(19) United States
(12) Patent Application Publication
(10) Pub. No.: US 2020/0237834 A1
(43) Pub. Date: Jul. 30, 2020

(54) COMPOSITIONS COMPRISING BACTERIAL STRAINS

(71) Applicant: 4D Pharma Research Limited, Aberdeen (GB)

(72) Inventors: Imke Elisabeth MULDER, Aberdeen (GB); Seanin Marie MCCLUSKEY, Aberdeen (GB); Helene SAVIGNAC, Aberdeen (GB); Ian JEFFERY, Cork (IE)

(21) Appl. No.: 16/784,958

(22) Filed: Feb. 7, 2020

Related U.S. Application Data
(63) Continuation of application No. PCT/EP2018/071831, filed on Aug. 10, 2018.

(30) Foreign Application Priority Data
Aug. 10, 2017 (GB) 1712857.0
Jan. 19, 2018 (GB) 1800866.4
Jul. 16, 2018 (EP) 18183642.0

(51) Int. Cl. A61K 35/74; A61K 9/48

(52) U.S. Cl. CPC A61K 35/74; A61K 9/0053; A61K 9/4808

(57) ABSTRACT

The invention provides compositions comprising bacterial strains and the use of such compositions in the treatment of disease.

### CROSS-REFERENCE

[0001] This application is a continuation of International Application No. PCT/EP2018/071831, filed Aug. 10, 2018, which claims the benefit of Great Britain Application No. 1712857.0, filed Aug. 10, 2017, Great Britain Application No. 1800866.4, filed Jan. 19, 2018, and European Application No. 18183642.0, filed Jul. 16, 2018, all of which are hereby incorporated by reference in their entirety.

### SEQUENCE LISTING

[0002] The instant application contains a Sequence Listing which has been submitted electronically in ASCII format and is hereby incorporated by reference in its entirety. Said ASCII copy, created on Feb. 4, 2020, is named 56708-731_301_SL.txt and is 4,128,360 bytes in size.

### TECHNICAL FIELD

[0003] This invention is in the field of compositions comprising bacterial strains and the use of such compositions in the treatment of disease.

### BACKGROUND TO THE INVENTION

[0004] The human intestine is thought to be sterile in utero, but it is exposed to a large variety of maternal and environmental microbes immediately after birth. Thereafter, a dynamic period of microbial colonization and succession occurs, which is influenced by factors such as delivery mode, environment, diet and host genotype, all of which impact upon the composition of the gut microbiota, particularly during early life. Subsequently, the microbiota stabilizes and becomes adult-like [1]. The human gut microbiota contains more than 500-1000 different phylotypes belonging essentially to two major bacterial divisions, the Bacteroidetes and the Firmicutes [2]. The successful symbiotic relationships arising from bacterial colonization of the human gut have yielded a wide variety of metabolic, structural, protective and other beneficial functions. The enhanced metabolic activities of the colonized gut ensure that otherwise indigestible dietary components are degraded with release of by-products providing an important nutrient source for the host. Similarly, the immunological importance of the gut microbiota is well-recognized and is exemplified in germfree animals which have an impaired immune system that is functionally reconstituted following the introduction of commensal bacteria [3-5].

[0005] Dramatic changes in microbiota composition have been documented in gastrointestinal disorders such as inflammatory bowel disease (IBD). For example, the levels of Clostridium cluster XIVa bacteria are reduced in IBD patients whilst numbers of E. coli are increased, suggesting a shift in the balance of symbionts and pathobionts within the gut [6-9]. Interestingly, this microbial alteration associated with the IBD inflammatory state is characterised by imbalances in T effector cell populations.

[0006] A hallmark of many human diseases linked to microbiota alteration is loss of microbiota diversity, distinct from so-called dysbiosis which is simply an altered microbiota composition compared to the typical aggregate microbiota in healthy subjects. Changes in the diversity of the gut microbiota have been linked to modulation in the risk of developing cancer [10]. Re-establishing the healthy microbiota can be difficult as the bacteria in the gut are resistant to colonisation. This poses a challenge when trying to treat the microbiota of unhealthy subjects by increasing the diversity of the microbiota [11]. However, the links between microbiota diversity and cancer are not well understood.

[0007] There is a requirement in the art for new methods of treating diseases which benefit from an increase in microbiota diversity and/or increased stability of the microbiota diversity.

### SUMMARY OF THE INVENTION

[0008] The inventors have developed new therapies for treating and/or preventing diseases by increasing and/or stabilising the intestinal microbiota diversity in a subject. In particular, the inventors have found that bacterial strains from the genus Enterococcus can be effective in increasing and/or stabilising the intestinal microbiota diversity in the distal gut of a subject. The inventors have identified that bacterial strains of the species selected from the list consisting of Enterococcus gallinarum and Enterococcus caselliflavus can be particularly effective at increasing and/or stabilising the microbiota diversity in a subject, especially a subject diagnosed with a disease.

[0009] The invention provides a composition comprising a bacterial strain of the genus Enterococcus, for use in a method of increasing and/or stabilising the microbiota diversity in a subject. Similarly, the invention also provides a method of increasing and/or stabilising the microbiota diversity in a subject wherein the method comprises a step of administering a composition comprising a bacterial strain of the genus Enterococcus to a subject. Preferably, the Enterococcus is a bacterial strain of the species Enterococcus gallinarum or Enterococcus caselliflavus.

[0010] The expression “increasing the microbiota diversity” is used herein to mean increasing the number of different types of bacteria and/or the evenness of the different types of bacteria in the microbiota of a subject. The microbiota diversity can be measured by an increase in the number of different genera, species or strains of bacteria in a subject. This increase in microbiota diversity can be in the intestine of the subject or in the distal gut of the subject. The increase or evenness may be measured relative to the diversity/evenness in the subject before administration of a composition according to the invention. The relative abundance of the different types of bacteria in the microbiota becomes more even following treatment with a composition of the invention.

[0011] By “stabilising microbiota diversity” it is meant that the relative numbers of the different genera in the microbiota remain stable (e.g. they fluctuate no more than 70%, 80%, 90% 95% or 99% between two measurements). The stabilisation of microbiota diversity can be in the intestine of the subject or in the distal gut of the subject. The relative stability may be assessed relative to the stability before a composition according to the invention has been administered.

[0012] The stability of a subject's microbiota can be assessed by comparing the microbiome from the subject at two different time points. The two different time points can be at least three days apart or more, for example at least 1 week, 2 weeks, 1 month, 3 months, 6 months, 1 year, or 2 years apart. The two different time points may be 3-7 days apart, 1-2 weeks apart, 2-4 weeks apart, 4-8 weeks apart, 8-24 weeks apart, 24-40 weeks apart, 40-52 weeks apart or more than 52 weeks apart. More than two different time points can be used, e.g. three, four, five or more than five time points. Suitable intervals are chosen between the various time points, for example, as set out above.

[0013] The increase or stabilisation in microbiota diversity may be quantified by measuring the number of the sequence-based bacterial classifications or Operational Taxonomic Units (OTUs) in a sample, typically determined by 16S rRNA amplicon sequencing methods. An increase of diversity may be measured by an increase in the Shannon Diversity Index, or the Chao index [12].

[0014] The inventors have also developed new therapies for treating and preventing diseases by increasing the microbiota diversity and/or stabilising the microbiota diversity in a subject. For example, the invention provides compositions comprising a bacterial strain of the genus Enterococcus for use in a method of increasing the microbiota diversity and/or stabilising the microbiota diversity in a subject diagnosed with cancer. As those skilled in the art will recognise, cancer patients, as a result of the effects of the disease and/or of their treatment may suffer from a reduction in the diversity of their microbiome which may be linked to the development or exacerbation of secondary diseases.

[0015] A reduction of diversity of the microbiome has been implicated in the development and/or exacerbation of an increasing number of diseases. These include neurological conditions such as Alzheimer's disease [13], Parkinson's disease [14], autism [15] and multiple sclerosis [16,17]; gastrointestinal disorders such as irritable bowel syndrome [18] and inflammatory bowel disease [19,20,21]; musculoskeletal disorders such as rheumatoid arthritis [22] and psoriatic arthritis [23]; metabolic disorders including Type I diabetes [24]; and wasting/fatigue conditions including sarcopenia [25] and myalgic encephalomyelitis [26].

[0016] Thus, the compositions of the present invention which can stabilise or improve the microbiome diversity of subjects (including in cancer patients) and thus treat or prevent diseases characterised by reduced microbiome diversity is desirable.

[0017] The invention provides a composition comprising a bacterial strain of the genus Enterococcus, for use in a method of increasing the microbiota diversity and/or stabilising the microbiota diversity in a subject. Bacteria from the genus Enterococcus can be identified by using a biochemical key [27]. A bacterial strain of the composition may have a 16S rRNA sequence that is at least 95% identical to the 16S rRNA sequence of a bacterial strain of Enterococcus gallinarum. The invention thus provides a composition comprising a bacterial strain that has a 16S rRNA sequence that is at least 95% identical to SEQ ID NO: 1, 2 or 5 (over 100% of the sequence) for use in a method of increasing the microbiota diversity and/or the stability of the microbiota in a subject.

[0018] The bacterial strain in the composition may be of Enterococcus gallinarum or Enterococcus caselliflavus. Closely related strains may also be used, such as bacterial strains that have a 16S rRNA sequence that is at least 95%, 96%, 97%, 98%, 99%, 99.5% or 99.9% identical to the 16S rRNA sequence of a bacterial strain of Enterococcus gallinarum or Enterococcus caselliflavus. Preferably, the bacterial strain has a 16S rRNA sequence that is at least 95%, 96%, 97%, 98%, 99%, 99.5% or 99.9% identical to SEQ ID NO:1, 2 or 5. Preferably, the bacterial strain for use in the invention has the 16S rRNA sequence represented by SEQ ID Nos 1, 2 or 5. This is preferred as the inventors have found that such a strain increases the microbiota diversity particularly well.

[0019] The bacteria strain may be the Enterococcus gallinarum bacterium deposited under accession number NCIMB 42488. The bacteria strain may be the Enterococcus gallinarum bacterium deposited under accession number NCIMB 42761. The bacteria strain may be an Enterococcus caselliflavus bacterium.

[0020] The composition of the invention may be suitable for oral administration. Oral administration of the strains of the composition can be effective for increasing the microbiota diversity in a subject. Also, oral administration is convenient for patients and practitioners and allows delivery to and/or partial or total colonisation of the intestine.

[0021] The composition of the invention may comprise one or more pharmaceutically acceptable excipients or carriers. The composition of the invention may comprise a bacterial strain that has been lyophilised. Lyophilisation is an effective and convenient technique for preparing stable compositions that allow delivery of bacteria.

[0022] The invention provides a food product comprising a composition as described above. The invention provides a vaccine composition comprising a composition as described above.

[0023] The invention also provides the use in therapy of a combination of a composition comprising a bacterial strain of the genus Enterococcus (preferably of the species Enterococcus gallinarum) and cyclophosphamide.

[0024] Additionally, the invention provides a method of increasing the microbiota diversity in a subject comprising administering a composition comprising a bacterial strain of the species Enterococcus gallinarum to the subject.

### BRIEF DESCRIPTION OF DRAWINGS

[0025] FIG. 1A: The Observed diversity after treatment with MRX518 at time points Day-14, Day 0 and Day 22 in EMT6 mice.

[0026] FIG. 1B: The Shannon diversity after treatment with MRX518 at time points Day-14, Day 0 and Day 22 in EMT6 mice.

[0027] FIG. 1C: The Observed diversity after treatment with MRX0554 at time points Day-14, Day 0 and Day 22 in EMT6 mice.

[0028] FIG. 1D: The Shannon diversity after treatment with MRX0554 at time points Day-14, Day 0 and Day 22 in EMT6 mice.

[0029] FIG. 1E: The Observed diversity after treatment with MRX0858 at time points Day-14, Day 0 and Day 22 in EMT6 mice.

[0030] FIG. 1F: The Shannon diversity after treatment with MRX0858 at time points Day-14, Day 0 and Day 22 in EMT6 mice.

[0031] FIG. 1G: The Observed diversity after treatment with REF 10 at time points Day-14, Day 0 and Day 22 in EMT6 mice.

[0032] FIG. 1H: The Shannon diversity after treatment with REF 10 at time points Day-14, Day 0 and Day 22 in EMT6 mice.

[0033] FIG. 1I: The Observed diversity after treatment with Anti-CTLA4 at time points Day-14, Day 0 and Day 22 in EMT6 mice.

[0034] FIG. 1J: The Shannon diversity after treatment with Anti-CTLA4 at time points Day-14, Day 0 and Day 22 in EMT6 mice.

[0035] FIG. 2: The Shannon diversity at Day 18 after treatment with bacterial strains MRX518 (G2), MRX0554 (G3), MRX0858 (G4), REF10-DSM100110 (G5), Anti-CTLA4 (G6) and untreated (G1) in LLC mice.

[0036] FIGS. 3A-3C: (FIG. 3A) PCoA ordination plot of microbiota profiles based on Bray-Curtis dissimilarities. The data is grouped according to timepoint and includes all treatment groups (p-value=0.001). Total N=210; Each timepoint n=70; (FIG. 3B) PCoA ordination plot of microbiota profiles based on Bray-Curtis dissimilarities. The data is grouped according to treatment at timepoint D-15. (p-value=0.077). Total N=70; Each treatment n=10. (FIG. 3C) PCoA ordination plot of microbiota profiles based on Bray-Curtis dissimilarities. The data is grouped according to treatment at timepoint D22. (p-value=0.001). Total N=70; Each treatment n=10.

### DISCLOSURE OF THE INVENTION

### Bacterial Strains

[0037] The compositions for use according to the invention comprise a bacterial strain of the genus Enterococcus. The examples demonstrate that bacteria of this genus are useful for increasing and/or stabilising the microbiota diversity in a subject. The preferred bacterial species of the genus are Enterococcus gallinarum or Enterococcus caselliflavus. Bacterial strains of Enterococcus gallinarum deposited under accession numbers NCIMB 42488 and NCIMB 42761 are preferred as the inventors have seen good results with these strains. It is preferred that the bacterial strain is not Enterococcus hirae.

[0038] Enterococcus spp. can be identified by random amplification of polymorphic DNA (RAPD) analysis. RAPD analysis does not require any specific knowledge of the DNA sequence of the target organism. RAPD markers are DNA fragments from PCR amplification of random segments of genomic DNA with a single primer of arbitrary nucleotide sequence and which are able to differentiate between genetically distinct individuals [28].

[0039] Enterococcus gallinarum forms coccoid cells, mostly in pairs or short chains. It is nonmotile and colonies on blood agar or nutrient agar are circular and smooth. Enterococcus gallinarum reacts with Lancefield group D antisera. The type strain of Enterococcus gallinarum is F87/276=PB21=ATCC 49573=CCUG 18658=CIP 103013=JCM 8728=LMG 13129=NBRC 100675=NCIMB 702313 (formerly NCDO 2313)=NCTC 12359 [29]. The GenBank accession number for a 16S rRNA gene sequence of Enterococcus gallinarum is AF039900 (disclosed herein as SEQ ID NO:1). An exemplary Enterococcus gallinarum strain is described in [29].

[0040] The Enterococcus gallinarum strain deposited under accession number NCIMB 42488 was tested in the Examples and is also referred to herein as strain MRX518. A 16S rRNA sequence for the MRX518 strain that was tested is provided in SEQ ID NO:2. Strain MRX518 was deposited with the international depositary authority NCIMB, Ltd. (Ferguson Building, Aberdeen, AB21 9YA, Scotland) by 4D Pharma Research Ltd. (Life Sciences Innovation Building, Aberdeen, AB25 2ZS, Scotland) on 16th November 2015 as “Enterococcus sp” and was assigned accession number NCIMB 42488.

[0041] The Enterococcus gallinarum strain deposited under accession number NCIMB 42761 was tested in the Examples and is also referred to herein as strain MRX554. References to MRX554 and MRx0554 are used interchangeably. Strain MRX554 was deposited with the international depositary authority NCIMB, Ltd. (Ferguson Building, Aberdeen, AB21 9YA, Scotland) by 4D Pharma Research Ltd. (Life Sciences Innovation Building, Aberdeen, AB25 2ZS, Scotland) on 22 May 2017 as “Enterococcus sp” and was assigned accession number NCIMB 42761.

[0042] The genome of the Enterococcus gallinarum strain MRX518 comprises a chromosome and plasmid. A chromosome sequence for strain MRX518 is provided in SEQ ID NO:3. A plasmid sequence for strain MRX518 is provided in SEQ ID NO:4. These sequences were generated using the PacBio RS II platform.

[0043] Bacterial strains closely related to the strains tested in the examples are also expected to be effective for increasing and/or stabilising the microbiota diversity in a subject. A composition according to the invention may thus comprise a strain which can increase and/or stabilise the microbial diversity in a subject relative to the level or stability of the microbial diversity in the subject before the composition was administered.

[0044] The bacterial strain for use in the invention can have a 16S rRNA sequence that is at least 95%, 96%, 97%, 98%, 99%, 99.5% or 99.9%, preferably at least 99.5% or 99.9%, identical to the 16S rRNA sequence of a bacterial strain of Enterococcus gallinarum or Enterococcus caselliflavus. The bacterial strain for use in the invention may have a 16S rRNA sequence that is at least 95%, 96%, 97%, 98%, 99%, 99.5% or 99.9% identical to SEQ ID NO:1, 2, or 5. Preferably, the bacterial strain for use in the invention has the 16S rRNA sequence represented by SEQ ID NOs: 1, 2 or 5.

[0045] Bacterial strains that are biotypes of the bacterium deposited under accession number NCIMB 42488, or NCIMB 42761 are also expected to be effective for increasing and/or stabilising the microbiota diversity in a subject. A biotype is a closely related strain that has the same or very similar physiological and biochemical characteristics, e.g. it can increase and/or stabilise the microbial diversity in a subject relative to the microbial diversity in the subject before the composition was administered to the same or similar level (e.g. x±20%, x±10%, x±5%, or x±1%) as a bacterium deposited under accession number NCIMB 42488, or NCIMB 42761.

[0046] Strains that are biotypes of the bacterium deposited under accession number NCIMB 42488 or NCIMB 42761 and that are suitable for use in the invention may be identified by sequencing other nucleotide sequences for the bacterium deposited under accession number NCIMB 42488 or NCIMB 42761. For example, substantially the whole genome may be sequenced and a biotype strain for use in the invention may have at least 95%, 96%, 97%, 98%, 99%, 99.5% or 99.9% sequence identity across at least 80% of its whole genome (e.g. across at least 85%, 90%, 95% or 99%, or across its whole genome). For example a biotype strain can have at least 98% sequence identity across at least 98% of its genome or at least 99% sequence identity across 99% of its genome. Other suitable sequences for use in identifying biotype strains may include hsp60 or repetitive sequences such as BOX, ERIC, (GTG)₅ (SEQ ID NO: 6), or REP [30].

[0047] A biotype strain may have a 16S rRNA sequence with at least 95%, 96%, 97%, 98%, 99%, 99.5% or 99.9% sequence identity to the corresponding 16S rRNA sequence of the bacterium deposited under accession number NCIMB 42488. A biotype strain can have a 16S rRNA sequence with at least 95%, 96%, 97%, 98%, 99%, 99.5% or 99.9% sequence identity to the corresponding 16S rRNA sequence of strain MRX518 deposited as NCIMB 42488 and comprises a 16S rRNA sequence that is at least 99% identical (e.g. at least 99.5% or at least 99.9% identical) to SEQ ID NO:2. A biotype strain can have a 16S rRNA sequence with at least 95%, 96%, 97%, 98%, 99%, 99.5% or 99.9% sequence identity to the corresponding 16S rRNA sequence of strain MRX518 deposited as NCIMB 42488 and has the 16S rRNA sequence of SEQ ID NO:2. Preferably, a biotype strain has a 16S rRNA sequence which is at least 99% identical (e.g. at least 99.5% identical or at least 99.9% identical) to the corresponding sequence of strain MRX518 deposited as NCIMB 42488.

[0048] A biotype strain may have a whole genome sequence with at least 95%, 96%, 97%, 98%, 99%, 99.5% or 99.9% sequence identity to the corresponding whole genome sequence of the bacterium deposited under accession number NCIMB 42761. A biotype strain can have a whole genome sequence with at least 95%, 96%, 97%, 98%, 99%, 99.5% or 99.9% sequence identity to the corresponding whole genome sequence of strain MRX554 deposited as NCIMB 42761 and further comprise a 16S rRNA sequence that is at least 99% identical (e.g. at least 99.5% or at least 99.9% identical) to SEQ ID NO:5. A biotype strain can have a whole genome sequence with at least 95%, 96%, 97%, 98%, 99%, 99.5% or 99.9% sequence identity to the corresponding sequence of strain MRX518 deposited as NCIMB 42488 and has the 16S rRNA sequence of SEQ ID NO:5. Preferably, a biotype strain has a whole genome sequence which is at least 99% identical (e.g. at least 99.5% identical or at least 99.9% identical) to the corresponding sequence of strain MRX554 deposited as NCIMB 42761.

[0049] A biotype of the invention will have a similar efficacy in increasing and/or stabilising the intestinal microbiota diversity in a subject as Enterococcus gallinarum or Enterococcus caselliflavus, as defined above. Thus, the biotype will effect an increase which is at least 80%, at least 85%, at least 90%, at least 95% or at least 99% of the increase compared to the increase effected by a bacterium of the strain Enterococcus gallinarum or Enterococcus caselliflavus as defined above. Alternatively, or in addition, a biotype of the invention may stabilise the microbiota diversity to a similar level as Enterococcus gallinarum or Enterococcus caselliflavus, as defined above, i.e. it may maintain a number of different types of bacteria in the microbiota of a subject which is at least 80%, at least 85%, at least 90%, at least 95% or at least 99% of the of the number of different types of bacteria stabilised by Enterococcus gallinarum or Enterococcus caselliflavus as defined above. The microbial diversity can be assessed by considering the number of different types of bacteria.

[0050] The bacterial strain for use in the invention may have a chromosome with sequence identity to SEQ ID NO:3. The bacterial strain for use in the invention can have a chromosome with at least 90% sequence identity (e.g. at least 92%, 94%, 95%, 96%, 97%, 98%, 99% or 100% sequence identity) to SEQ ID NO:3 across at least 60% (e.g. at least 65%, 70%, 75%, 80%, 85%, 95%, 96%, 97%, 98%, 99% or 100%) of SEQ ID NO:3. For example, the bacterial strain for use in the invention may have a chromosome with at least 90% sequence identity to SEQ ID NO:3 across 70% of SEQ ID NO:3, or at least 90% sequence identity to SEQ ID NO:3 across 80% of SEQ ID NO:3, or at least 90% sequence identity to SEQ ID NO:3 across 90% of SEQ ID NO:3, or at least 90% sequence identity to SEQ ID NO:3 across 100% of SEQ ID NO:3, or at least 95% sequence identity to SEQ ID NO:3 across 70% of SEQ ID NO:3, or at least 95% sequence identity to SEQ ID NO:3 across 80% of SEQ ID NO:3, or at least 95% sequence identity to SEQ ID NO:3 across 90% of SEQ ID NO:3, or at least 95% sequence identity to SEQ ID NO:3 across 100% of SEQ ID NO:3, or at least 98% sequence identity to SEQ ID NO:3 across 70% of SEQ ID NO:3, or at least 98% sequence identity to SEQ ID NO:3 across 80% of SEQ ID NO:3, or at least 98% sequence identity to SEQ ID NO:3 across 90% of SEQ ID NO:3, or at least 98% identity to SEQ ID NO:3 across 95% of SEQ ID NO:3, or at least 98% sequence identity to SEQ ID NO:3 across 100% of SEQ ID NO:3, or at least 99.5% sequence identity to SEQ ID NO:3 across 90% of SEQ ID NO:3, or at least 99.5% identity to SEQ ID NO:3 across 95% of SEQ ID NO:3, or at least 99.5% identity to SEQ ID NO:3 across 98% of SEQ ID NO:3, or at least 99.5% sequence identity to SEQ ID NO:3 across 100% of SEQ ID NO:3.

[0051] The bacterial strain for use in the invention can be a plasmid with sequence identity to SEQ ID NO:4. The bacterial strain for use in the invention can have a plasmid with at least 90% sequence identity (e.g. at least 92%, 94%, 95%, 96%, 97%, 98%, 99% or 100% sequence identity) to SEQ ID NO:4 across at least 60% (e.g. at least 65%, 70%, 75%, 80%, 85%, 95%, 96%, 97%, 98%, 99% or 100%) of SEQ ID NO:4. For example, the bacterial strain for use in the invention may have a plasmid with at least 90% sequence identity to SEQ ID NO:4 across 70% of SEQ ID NO:4, or at least 90% sequence identity to SEQ ID NO:4 across 80% of SEQ ID NO:4, or at least 90% sequence identity to SEQ ID NO:4 across 90% of SEQ ID NO:4, or at least 90% sequence identity to SEQ ID NO:4 across 100% of SEQ ID NO:4, or at least 95% sequence identity to SEQ ID NO:4 across 70% of SEQ ID NO:4, or at least 95% sequence identity to SEQ ID NO:4 across 80% of SEQ ID NO:4, or at least 95% sequence identity to SEQ ID NO:4 across 90% of SEQ ID NO:4, or at least 95% sequence identity to SEQ ID NO:4 across 100% of SEQ ID NO:4, or at least 98% sequence identity to SEQ ID NO:4 across 70% of SEQ ID NO:4, or at least 98% sequence identity to SEQ ID NO:4 across 80% of SEQ ID NO:4, or at least 98% sequence identity to SEQ ID NO:4 across 90% of SEQ ID NO:4, or at least 98% sequence identity to SEQ ID NO:4 across 100% of SEQ ID NO:4.

[0052] The bacterial strain for use in the invention may have a chromosome with sequence identity to SEQ ID NO:3, for example as described above, and a 16S rRNA sequence with sequence identity to any of SEQ ID NO:1 or 2, for example as described above, preferably with a 16S rRNA sequence that is at least 99% identical to SEQ ID NO: 2, more preferably which comprises the 16S rRNA sequence of SEQ ID NO:2, and optionally comprises a plasmid with sequence identity to SEQ ID NO:4, as described above.

[0053] The bacterial strain for use in the invention may have a chromosome with sequence identity to SEQ ID NO:3, for example as described above, and optionally comprise a plasmid with sequence identity to SEQ ID NO:4, as described above, and is effective for increasing the microbiota diversity in a subject.

[0054] The bacterial strain for use in the invention can have a chromosome with sequence identity to SEQ ID NO:3, for example as described above, and a 16S rRNA sequence with sequence identity to any of SEQ ID NOs: 1 or 2, for example as described above, and optionally comprises a plasmid with sequence identity to SEQ ID NO:4, as described above, and is effective increasing the microbiota diversity in a subject.

[0055] The bacterial strain for use in the invention may have a 16S rRNA sequence that is at least 99%, 99.5% or 99.9% identical to the 16S rRNA sequence represented by SEQ ID NO: 2 (for example, which comprises the 16S rRNA sequence of SEQ ID NO:2) and a chromosome with at least 95% sequence identity to SEQ ID NO:3 across at least 90% of SEQ ID NO:3, and optionally comprises a plasmid with sequence identity to SEQ ID NO:4, as described above, and which is effective for increasing the microbiota diversity in a subject.

[0056] The bacterial strain for use in the invention can have a 16S rRNA sequence that is at least 99%, 99.5% or 99.9% identical to the 16S rRNA sequence represented by SEQ ID NO: 2 (for example, which comprises the 16S rRNA sequence of SEQ ID NO:2) and a chromosome with at least 98% sequence identity (e.g. at least 99% or at least 99.5% sequence identity) to SEQ ID NO:3 across at least 98% (e.g. across at least 99% or at least 99.5%) of SEQ ID NO:3, and optionally comprises a plasmid with sequence identity to SEQ ID NO:4, as described above, and which is effective for increasing the microbiota diversity in a subject.

[0057] The bacterial strain for use in the invention may be Enterococcus gallinarum and may have a 16S rRNA sequence that is at least 99%, 99.5% or 99.9% identical to the 16S rRNA sequence represented by SEQ ID NO: 2 (for example, which comprises the 16S rRNA sequence of SEQ ID NO:2) and a chromosome with at least 98% sequence identity (e.g. at least 99% or at least 99.5% sequence identity) to SEQ ID NO:3 across at least 98% (e.g. across at least 99% or at least 99.5%) of SEQ ID NO:3, and optionally comprises a plasmid with sequence identity to SEQ ID NO:4, as described above, and which is effective for increasing the microbiota diversity in a subject.

[0058] References to a percentage sequence identity between two nucleotide sequences refers to the percentage of nucleotides that are the same in comparing the two sequences when aligned. This alignment and percent homology or sequence identity can be determined using software programs known in the art, for example those described in section 7.7.18 of ref. [31]. A preferred alignment is determined by the Smith-Waterman homology search algorithm using an affine gap search with a gap open penalty of 12 and a gap extension penalty of 2, BLOSUM matrix of 62. The Smith-Waterman homology search algorithm is disclosed in ref [32].

[0059] Other possible computer programs are BLAST or FASTA, in which two sequences are aligned for optimal matching of their respective residues (either along the full length of one or both sequences or along a pre-determined portion of one or both sequences). The programs provide a default opening penalty and a default gap penalty, and a scoring matrix such as PAM 250 [33] can be used in conjunction with the computer program. For example, the percent identity can then be calculated as: the total number of identical matches multiplied by 100 and then divided by the sum of the length of the longer sequence within the matched span and the number of gaps introduced into the shorter sequences in order to align the two sequences.

[0060] Alternatively, strains that are biotypes of the bacterium deposited under accession number NCIMB 42488 or NCIMB 42761 and that are suitable for use in the invention may be identified by using the accession number NCIMB 42488 or NCIMB 42761 deposit and restriction fragment analysis and/or PCR analysis, for example by using fluorescent amplified fragment length polymorphism (FAFLP) and repetitive DNA element (rep)-PCR fingerprinting, or protein profiling, or partial 16S or 23s rDNA sequencing. These techniques may be used to identify other Enterococcus gallinarum or Enterococcus caselliflavus strains.

[0061] Strains that are biotypes of the bacterium deposited under accession number NCIMB 42488 or NCIMB 42761 and that are suitable for use in the invention may be strains that provide the same pattern as the bacterium deposited under accession number NCIMB 42488 or NCIMB 42761 when analysed by amplified ribosomal DNA restriction analysis (ARDRA), for example when using Sau3AI restriction enzyme (for exemplary methods and guidance see, for example reference 34). Alternatively, biotype strains may be identified as strains that have the same carbohydrate fermentation patterns as the bacterium deposited under accession number NCIMB 42488 or NCIMB 42761. The carbohydrate fermentation pattern can be determined using the API 50 CHL panel (bioMérieux). The bacterial strain used in the invention can be:
[0062] (i) positive for fermentation of at least one of (e.g. at least 2, 3, 4, 5, 6, 7, 8, 9, 10, 11, 12, 13, 14, 15, 16, 17 or all of): L-arabinose, D-ribose, D-xylose, D-galactose, D-glucose, D-fructose, D-mannose, N-acetylglucosamine, amygdalin, arbutin, salicin, D-cellobiose, D-maltose, D-trehalose, gentiobiose, and D-tagatose; and/or
[0063] (ii) intermediate for fermentation of at least one of (e.g. at least 2, 3, 4 or all of): D-mannitol, Methyl-αD-glycopyranoside, D-lactose, starch, and;
   [0064] preferably as determined by API 50 CHL analysis (preferably using the API 50 CHL panel from bioMérieux).

[0065] Preferably biotype strains that are suitable for use in the invention are strains that have a carbohydrate fermentation pattern of:
[0066] (i) positive for fermentation of L-arabinose, D-ribose, D-xylose, D-galactose, D-glucose, D-fructose, D-mannose, N-acetylglucosamine, amygdalin, arbutin, esculin, salicin, D-cellobiose, D-maltose, D-trehalose, gentiobiose, and D-tagatose; and/or
[0067] (ii) intermediate for fermentation of D-mannitol, Methyl-αD-glycopyranoside, starch, and;
   [0068] preferably as determined by API 50 CHL analysis (preferably using the API 50 CHL panel from bioMérieux).

[0069] Preferably biotype strains that are suitable for use in the invention are strains that have a carbohydrate fermentation pattern of:
[0070] (i) positive for fermentation of L-arabinose, D-xylose, D-galactose, D-glucose, D-fructose, D-mannose, N-acetylglucosamine, amygdalin, arbutin, esculin, salicin, D-cellobiose, D-maltose, D-lactose, D-saccharose (sucrose), D-trehalose and gentiobiose; and/or
[0071] (ii) intermediate for fermentation of methyl-αD-glycopyranoside and melibiose
   preferably as determined by API 50 CHL analysis (preferably using the API 50 CHL panel from bioMérieux). Other strains that are useful in the compositions and methods of the invention, such as biotypes of the bacterium deposited under accession number NCIMB 42488 or NCIMB 42761, may be identified using any appropriate method or strategy, including the assays described in the examples. For instance, strains for use in the invention may be identified by culturing in anaerobic YCFA and/or administering the bacteria to the type II collagen-induced arthritis mouse model and then assessing cytokine levels. In particular, bacterial strains that have similar growth patterns, metabolic type and/or surface antigens to the bacterium deposited under accession number NCIMB 42488 or NCIMB 42761 may be useful in the invention. A useful strain will have comparable immune modulatory activity to the NCIMB 42488 strain.

[0072] The bacterial strain used in the invention can be:
[0073] (i) Positive for at least one of (e.g. at least 2, 3, 4, 5, 6, 7 or all of): mannose fermentation, glutamic acid decarboxylase, arginine arylamidase, phenylalanine arylamidase, pyroglutamic acid arylamidase, tyrosine arylamidase, histidine arylamidase and serine arylamidase; and/or
[0074] (ii) Intermediate for at least one of (e.g. at least 2 or all of): β-galactosidase-6-phosphate, β-glucosidase and N-acetyl-β-glucosaminidase; and/or
[0075] (iii) Negative for at least one of (e.g. at least 2, 3, 4, 5, 6 or all of): Raffinose fermentation, Proline arylamidase, Leucyl glycine arylamidase, Leucine arylamidase, Alanine arylamidase, Glycine arylamidase and Glutamyl glutamic acid arylamidase, preferably as determined by an assay of carbohydrate, amino acid and nitrate metabolism, and optionally an assay of alkaline phosphatase activity, more preferably as determined by Rapid ID 32A analysis (preferably using the Rapid ID 32A system from bioMérieux).

[0076] The bacterial strain used in the invention can be:
[0077] (i) Negative for at least one of (e.g. at least 2, 3, or all 4 of) glycine arylamidase, raffinose fermentation, proline arylamidase, and leucine arylamidase, for example, as determined by an assay of carbohydrate, amino acid and nitrate metabolism, preferably as determined by Rapid ID 32A analysis (preferably using the Rapid ID 32A system from bioMérieux); and/or
[0078] (ii) Intermediate positive for fermentation of L-fucose, preferably as determined by API 50 CHL analysis (preferably using the API 50 CHL panel from bioMérieux).

[0079] The bacterial strain used in the invention is an extracellular ATP producer, for example one which produces 6-6.7 ng/μl (for example, 6.1-6.6 ng/μl or 6.2-6.5 ng/μl or 6.33±0.10 ng/μl) of ATP as measured using the ATP Assay Kit (Sigma-Aldrich, MAK190). Bacterial extracellular ATP can have pleiotropic effects including activation of T cell-receptor mediated signalling [35], promotion of intestinal Th17 cell differentiation [36] and induction of secretion of the pro-inflammatory mediator IL-1β by activating the NLRP3 inflammasome [37]. Accordingly, a bacterial strain which is an extracellular ATP producer is useful for increasing and/or stabilising the microbiota diversity in a subject.

[0080] The bacterial strain for use in the invention can comprises one or more of the following three genes: Mobile element protein; Xylose ABC transporter, permease component; and FIG. 00632333: hypothetical protein. For example, the bacterial strain for use in the invention comprises genes encoding Mobile element protein and Xylose ABC transporter, permease component; Mobile element protein and FIG. 00632333: hypothetical protein; Xylose ABC transporter, permease component and FIG. 00632333: hypothetical protein; or Mobile element protein, Xylose ABC transporter, permease component, and FIG. 00632333: hypothetical protein.

[0081] As discussed above, the Enterococcus gallinarum or Enterococcus caselliflavus strain for use in the invention may be a strain which has the same safety and therapeutic efficacy characteristics as the strains deposited under accession number NCIMB 42488 or NCIMB 42761. The composition can therefore comprise an Enterococcus gallinarum strain that is not the strain deposited under accession number NCIMB 42488 or NCIMB 42761 but has the same safety and therapeutic efficacy characteristics as the strains deposited under accession number NCIMB 42488 or NCIMB 42761. The safety characteristics of a strain can be established for example by testing the resistance of the strain to antibiotics, for example distinguishing between intrinsic and transmissible resistance to antibiotics. The safety characteristics of a strain can also be established by evaluating the pathogenic properties of a strain in vitro, for example the levels of toxin production. Other safety tests include testing the acute or chronic toxicity of the bacterial strain in rat and mice models. The therapeutic efficacy of a strain can be established by functional characterization of the bacterial strain in vitro and in vivo using a relevant model.

[0082] In preferred embodiments, the bacterial strains in the compositions of the invention are viable and capable of partially or totally colonising the intestine.

### Therapeutic Uses

[0083] The compositions of the invention are for use in a method of increasing and/or stabilising the microbiota diversity in a subject diagnosed with a disease. The examples demonstrate that administration of the compositions of the invention can lead to increased microbiota diversity. They further show that the compositions of the invention can increase the stability of the microbiota diversity in a subject.

[0084] Accordingly, the disease to be treated or prevented using a composition of the invention is preferably a disease associated with a level of microbiota diversity that is reduced relative to the microbiota diversity of a healthy subject and/or a disease that is associated with reduced stability of the microbiota.

[0085] The compositions are for use in a subject that exhibits, or is expected to exhibit, reduced levels of microbiota diversity, for instance, when compared to a healthy subject, or a population of healthy subjects. For instance the composition can be for use in treating a subject having less than 101 different bacterial species (e.g. less than 100, 99, 98, 97, 96, 95, 93, 90, 85, 80, 75 or 70 bacterial species) and/or less than 195 different strains (e.g. less than 193, 190, 187, 185, 183, 180, 175, 170, 165, 160, 150, 140 bacterial strains) in its microbiota. For example, the composition can be for use in treating a subject that has at least one bacterial genus (e.g. at least 2, 3, 4, 5, 6, 7, 8, 9 or 10 bacterial genera) fewer in its intestinal microbiota compared to a healthy subject or compared to a population of healthy subjects. The treatment or prevention can comprise a step of diagnosing a subject as having a reduced level of microbiota diversity and then if a reduced level of diversity is found to be present, the subject is then treated with a composition according to the invention.

[0086] Reduced diversity of the microbiota is associated with numerous pathological diseases, and the examples demonstrate that the compositions of the invention may be effective at increasing and/or stabilising the microbiota diversity in a subject. A skilled person can easily identify suitable diseases which would benefit from the increase in microbiota diversity/stability effected by the compositions of the invention by assessing the microbiota diversity and/or stability in a patient and comparing it with those of a healthy subject.

[0087] The pathogenesis of the disease can affect the intestine. However, in other cases the pathogenesis of the disease does not affect the intestine or is not localised at the intestine. The treatment or prevention of the disease can occur in the intestine or it can occur at a distal site. The disease that is being treated may be systemic.

[0088] Examples of diseases characterised by reduced diversity of the microbiota which may be treated using the compositions of the present invention include neurological conditions such as Alzheimer's disease, Parkinson's disease, autism and multiple sclerosis; gastrointestinal disorders such as irritable bowel syndrome and inflammatory bowel disease; musculoskeletal disorders such as rheumatoid arthritis and psoriatic arthritis; metabolic disorders including Type I diabetes; and wasting/fatigue conditions including sarcopenia and myalgic encephalomyelitis.

[0089] The examples show that treatment with compositions of the invention leads to increased microbiota diversity and/or stability of the microbiota. Therefore, the compositions as described above are useful in a method of increasing and/or stabilising the microbiota diversity in a subject. As explained above, there are a substantial number of diseases associated with reductions in microbiome diversity. A reduction in microbiome diversity may be caused and/or exacerbated by certain diseases (e.g. cancer) or the therapies used to treat those diseases.

[0090] The compositions of the invention can be used for increasing and/or stabilising the microbiota diversity in a subject diagnosed with cancer. Links have previously been suggested between the gut microbiome and a number of cancers. For example, taxonomic analysis of faecal samples from patients with colorectal cancer showed a decrease in the diversity of the microbiota compared to healthy patients. Increasing the diversity of the microbiota may therefore not only prevent or treat diseases characterised by a reduction in microbiome diversity, but advantageously also contribute to the prevention or treatment of cancer such as colorectal cancer.

[0091] The compositions are for use in subjects that exhibit, or are expected to exhibit, reduced stability of the microbiota diversity, for instance, when compared to a healthy subject, or a population of healthy subjects. The treatment or prevention can comprise a step of diagnosing a subject as having a reduced stability in its microbiota and then if reduced stability is found to be present, the subject is then treated with a composition according to the invention.

[0092] A composition comprising a bacterial strain of the genus Enterococcus, as defined herein, may also be used in combination with cyclophosphamide for use in treating cancer, an inflammatory disorder or an autoimmune disease.

[0093] Bacteria in the microbiota may be detected in faeces from a subject, using standard techniques, such as the qPCR techniques used in the examples.

[0094] The subject can be an infant (a subject between the ages 0-1 years), a child (a subject between the ages of 1-18 years) or an adult (a subject with an age above 18 years). The subject can be a healthy subject, in which the composition can be used to prevent a disease, optionally the healthy subject may be one identified as being at risk of developing a disease characterised by a reduction in microbiota diversity.

[0095] The subject can have previously received, is receiving, or will be receiving antibiotic treatment (e.g. within one week or month from administration of a composition according to the invention). The treatment can comprises administering the composition of the invention after, together with, or before antibiotic treatment. The composition of the invention and the one or more antibiotics may be for separate, simultaneous or sequential administration.

[0096] The composition of the invention can be for use in a method of increasing and/or stabilising the microbiota diversity in a subject having an increased level of hydrogen in their breath relative to a healthy subject. The composition of the invention can be for use in reducing the hydrogen level in the breath of a subject exhibiting or who is expected to exhibit a reduced level of diversity and/or the stability of the of its microbiota. The subject may be a subject diagnosed as having cancer. Treatment with a composition of the invention reduces the level of hydrogen detected in hydrogen breath tests. Accordingly, the hydrogen levels are preferably assessed using a hydrogen breath test. The hydrogen breath test is well known in the art and so the skilled person will know how to conduct such a test and can involve administering lactulose to the subject.

[0097] The hydrogen breath test is also a useful tool for monitoring the effectiveness or likely effectiveness of increasing or stabilising the microbiota diversity after treatment using a composition or a combination therapy of the invention. For example, a reduction in the level of hydrogen detected in a subject's breath following treatment with a composition or combination therapy of the invention may indicate that the treatment is increasing the microbiota diversity in the subject. Accordingly, the methods and uses of the invention further comprise monitoring the hydrogen level in a subject's breath during and/or following treatment with a composition of the invention and thereby assessing the effectiveness or likely effectiveness of increasing the microbiota diversity in the subject. For example, hydrogen levels may be monitored at one or more (e.g. 1, 2, 3, 4 or more than 4) times, including before treatment, at the start of treatment, during treatment, at the end of treatment and/or following treatment, as desired. The level of hydrogen in the subject's breath at the end and/or following the dosing period (during which the composition is administered to the subject) is compared to the level at the start and/or before the dosing period and a reduction in the level indicates the effectiveness or likely effectiveness of increasing the microbiota diversity in the subject. The hydrogen level in the subject's breath can be measured at multiple times. For example, if the dosing period is 16 days, it may be desirable to take measurements at day 1 and day 16, or for example at day 1, day 2, day 15 and day 16. Multiple measurements can be taken and the mean of those measurements obtained (for example, the mean of day 1 and day 2 and the mean of day 15 and day 16). A reduction in at least 40 ppm in the hydrogen level Cmax indicates that the composition is effective or likely to be effective at increasing the microbiota diversity in the subject. The hydrogen breath test is a standard assay and so predetermined levels are known in the art.

[0098] The inventors have shown that the abundance of Barnesiella intestinihominis was increased following administration of a composition comprising a bacterial strain of the genus Enterococcus, as defined herein, as evidenced by the examples of the present specification. That organism has been shown to have an immunostimulatory effect. More specifically, that organism has been shown to promote cyclophosphamide-induced therapeutic immunomodulatory effects through the infiltration of IFN-producing T cells in cancer lesions. Furthermore, Barnesiella intestinihominis specific-memory Th1 cell immune responses selectively predicted longer progression-free survival in advanced lung and ovarian cancer patients treated with chemo-immunotherapy. [38]. By using a composition comprising a bacterial strain of the genus Enterococcus, the invention thus increases the levels of Barnesiella intestinihominis and so promotes cyclophosphamide efficacy. The combination therapy of the invention is therefore particularly useful for treating diseases which are known to benefit from cyclophosphamide treatment as the combination will enhance the efficacy of the treatment. Known diseases which can be treated with cyclophosphamide comprise cancer, inflammatory and autoimmune disorders.

[0099] Through the administration of the compositions of the invention, not only is microbiome diversity stabilised (if not increased) but advantageously, the abundance of Barnesiella intestinihominis is also increased. Thus, the compositions of the invention are particularly useful in stabilising or improving the microbiome diversity in cancer patients.

[0100] The compositions of the invention may therefore increase the levels of Barnesiella intestinihominis species. A skilled person will understand that this increase will be relative to the levels of the Barnesiella intestinihominis species prior to administration of the composition.

[0101] Barnesiella intestinihominis has been reported to enhance the immunomodulatory effect of cyclophosphamide [38]. The data in the examples therefore confirm that the combination of a composition comprising a bacterial strain of the species Enterococcus gallinarum with cyclophosphamide is particularly useful. Thus, according to an aspect of the present invention, there is provided the use in therapy of a combination of a composition comprising a bacterial strain of the genus Enterococcus and cyclophosphamide. Preferably the bacterial strain is of the species Enterococcus gallinarum.

[0102] In such embodiments, the composition comprising the bacterial strain of the genus Enterococcus may be administered to increase levels of Barnesiellla intestinihominis in the gastrointestinal tract of a patient to enhance the immunomodulatory effect of cyclophosphamide.

[0103] In embodiments of this aspect of the invention, the combination of a composition comprising a bacterial strain of the genus Enterococcus and cyclophosphamide may be used to treat cancer. For example, the combination may be for use in reducing tumour size, reducing tumour growth, or reducing angiogenesis in the treatment of cancer.

[0104] In certain embodiments, the combination is for use in treating or preventing colorectal cancer, such as colon cancer, preferably colorectal adenocarcinoma. In some embodiments, the cancer is of the intestine. In other embodiments, the combination is for use in treating or preventing lung cancer, lymphoma, multiple myeloma, leukemia, ovarian cancer, breast cancer (in particular carcinoma), small cell lung cancer, neuroblastoma, sarcoma, retinoblastoma, adenocarcinoma (in particular of the ovary) or liver cancer. In other embodiments, the compositions of the invention are for use in treating or preventing carcinoma.

[0105] In embodiments, the combination of a composition comprising a bacterial strain of the genus Enterococcus and cyclophosphamide is useful for treating an autoimmune or inflammatory disease. Examples of diseases (which are known to respond to treatment with cyclophosphamide) which may be treated with the combination include nephrotic syndrome, systemic lupus erythematosus, granulomatosis with polyangiitis, aplastic anemia, microscopic polyangiitis, polyarteritis nodosa, eosinophilic granulomatosis with polyangiitis (Churg-Strauss syndrome), Behçet syndrome, primary angiitis of the central nervous system, isolated vasculitic neuropathy, following organ transplant and in preparation for bone marrow transplantation. Generally, the combination of a composition of the invention and cyclophosphamide will be used for a disease where an increase and/or stabilisation of the microbiota diversity in the subject suffering from the disease is expected to be beneficial.

[0106] In addition to their positive effects on levels of Barnesiella intestihominis (and improving microbiome diversity) the compositions have also advantageously been demonstrated in the examples to increase the levels of a number of short-chain fatty acid producing bacteria, including those from the genera Lachnospiraceae and Roseburia. Organisms belonging to those genera have been associated with the treatment of several diseases including inflammatory bowel disease (in the case of organisms belonging to the genus Roseburia [39]) and weight loss (in the case of members of the Lachnospiraceae genus).

[0107] The compositions of the invention may therefore increase the levels of Lachnospiraceae and/or Roseburia species. A skilled person will understand that this increase will be relative to the levels of the Lachnospiraceae and/or Roseburia species (respectively) prior to administration of the composition.

[0108] The examples demonstrate that the compositions can increase the abundance of bacteria from the genera Lachnospiraceae. A reduction in the levels of bacteria from the genera Lachnospiraceae in the human microbiota have been linked to gastrointestinal diseases such as inflammatory bowel disease (IBD), ulcerative colitis and Crohn's disease [40]. Cyclophosphamide treatment has been shown to reduce the level of numerous bacterial species including those from the genera Lachnospiraceae [41].

[0109] Therefore, in some embodiments the combination of a composition comprising a bacterial strain of the genus Enterococcus and cyclophosphamide can used to increase levels of the genera Lachnospiraceae in the gastrointestinal tract. Administering cyclophosphamide in combination with a bacterial strain of the genus Enterococcus prevents a decrease in the relevance of bacteria genera Lachnospiraceae that is associated with cyclophosphamide treatment. Increasing the levels of the genera Lachnospiraceae may prevent or treat gastrointestinal diseases such as inflammatory bowel disease, ulcerative colitis and Crohn's disease.

[0110] The compositions of the invention have further been shown to influence the levels of Clostridium species. These organisms have been associated with modulation of the immune system and efficacy in the prevention and treatment of autoimmune, infectious and allergic diseases.

[0111] The examples have also shown that the compositions of the invention can increase the levels of bacteria from the genera Alistipes. Patients suffering from IBD have a decrease in their microbiota diversity. Taxa that are significantly depleted compared to healthy controls include bacteria from the genera Alistipes and Barnesiella [42]. Therefore, the compositions of the invention may be useful in treating or preventing gastrointestinal diseases such as inflammatory bowel disease, ulcerative colitis and Crohn's disease. The compositions of the invention may treat gastrointestinal diseases such as inflammatory bowel disease, ulcerative colitis and Crohn's disease by increasing the levels of include bacteria from the genera Alistipes and/or Barnesiella.

[0112] Compositions of the invention have been demonstrated in the examples to exert a limiting effect on the pentose phosphate pathway, as characterised by a reduction in the formation of metabolites including ribose 5-phosphate, erythrose 4-phosphate and sedoheptulose 7-phosphate.

[0113] Again, this property of the compositions of the present invention is advantageous because this pathway has been implicated as having a protective effect in assisting glycolytic cancer cells to tackle oxidative stress, and could therefore be protective to tumour cells. Literature has further shown that Glucose-6-phosphate dehydrogenase deficiency can protect against cancer, in particular breast, colorectal cancer etc. and that an increase in members of the pentose phosphate pathway is associated with poor outcomes in cancer patients [43,44]. Thus, when the compositions of the present invention are used to promote the diversity of the microbiome in subjects that would benefit from a reduction in the pentose phosphate pathway (e.g. cancer patients), they may additionally exert this effect.

[0114] Thus, according to a further aspect of the present invention, there is provided a composition comprising a bacterial strain of the genus Enterococcus, for use in reducing the formation in vivo of at least one metabolite associated with the pentose phosphate pathway in a subject in need of such treatment, for example, at risk of or diagnosed with a disease caused or exacerbated by normal or elevated function of the pentose phosphate. For example, the metabolite may be ribose 5-phosphate, erythrose 4-phosphate and sedoheptulose 7-phosphate.

[0115] The compositions of the invention can be used to improve and/or stabilise the microbiota diversity in a patient that has previously received chemotherapy. The compositions of the invention may be used to improve and/or stabilise the microbiota diversity in a patient that has not tolerated a chemotherapy treatment.

[0116] The compositions of the invention may also be useful in increasing and/or stabilising microbiota diversity in a patient diagnosed with acute lymphoblastic leukemia (ALL), acute myeloid leukemia, adrenocortical carcinoma, basal-cell carcinoma, bile duct cancer, bladder cancer, bone tumor, osteosarcoma/malignant fibrous histiocytoma, brainstem glioma, brain tumor, cerebellar astrocytoma, cerebral astrocytoma/malignant glioma, ependymoma, medulloblastoma, supratentorial primitive neuroectodermal tumors, breast cancer, bronchial adenomas/carcinoids, Burkitt's lymphoma, carcinoid tumor, cervical cancer, chronic lymphocytic leukemia, chronic myelogenous leukemia, chronic myeloproliferative disorders, colon cancer, cutaneous T-cell lymphoma, endometrial cancer, ependymoma, esophageal cancer, Ewing's sarcoma, intraocular melanoma, retinoblastoma, gallbladder cancer, gastric cancer, gastrointestinal carcinoid tumor, gastrointestinal stromal tumor (GIST), germ cell tumor, glioma, childhood visual pathway and hypothalamic, Hodgkin lymphoma, melanoma, islet cell carcinoma, Kaposi sarcoma, renal cell cancer, laryngeal cancer, leukaemias, lymphomas, mesothelioma, neuroblastoma, non-Hodgkin lymphoma, oropharyngeal cancer, osteosarcoma, ovarian cancer, pancreatic cancer, parathyroid cancer, pharyngeal cancer, pituitary adenoma, plasma cell neoplasia, prostate cancer, renal cell carcinoma, retinoblastoma, sarcoma, testicular cancer, thyroid cancer, or uterine cancer.

[0117] The compositions of the invention may be used to increase and/or stabilise microbiota diversity in a patient being treated with further therapeutic agents. The compositions of the invention may be combined with anti-cancer agents. Preferably, the invention provides a composition comprising a bacterial strain of the species Enterococcus gallinarum and an anticancer agent. Preferably, the anticancer agent is an immune checkpoint inhibitor, a targeted antibody immunotherapy, a CAR-T cell therapy, an oncolytic virus, or a cytostatic drug. In preferred embodiments, the composition comprises an anti-cancer agent selected from the group consisting of: Yervoy (ipilimumab, BMS); Keytruda (pembrolizumab, Merck); Opdivo (nivolumab, BMS); MEDI4736 (AZ/MedImmune); MPDL3280A (Roche/Genentech); Tremelimumab (AZ/MedImmune); CT-011 (pidilizumab, CureTech); BMS-986015 (lirilumab, BMS); MEDI0680 (AZ/MedImmune); MSB-0010718C (Merck); PF-05082566 (Pfizer); MEDI6469 (AZ/MedImmune); BMS-986016 (BMS); BMS-663513 (urelumab, BMS); IMP321 (Prima Biomed); LAG525 (Novartis); ARGX-110 (arGEN-X); PF-05082466 (Pfizer); CDX-1127 (varlilumab; CellDex Therapeutics); TRX-518 (GITR Inc.); MK-4166 (Merck); JTX-2011 (Jounce Therapeutics); ARGX-115 (arGEN-X); NLG-9189 (indoximod, NewLink Genetics); INCB024360 (Incyte); IPH2201 (Innate Immotherapeutics/AZ); NLG-919 (NewLink Genetics); anti-VISTA (JnJ); Epacadostat (INCB24360, Incyte); F001287 (Flexus/BMS); CP 870893 (University of Pennsylvania); MGA271 (Macrogenix); Emactuzumab (Roche/Genentech); Galunisertib (Eli Lilly); Ulocuplumab (BMS); BKT140/BL8040 (Biokine Therapeutics); Bavituximab (Peregrine Pharmaceuticals); CC 90002 (Celgene); 852A (Pfizer); VTX-2337 (VentiRx Pharmaceuticals); IMO-2055 (Hybridon, Idera Pharmaceuticals); LY2157299 (Eli Lilly); EW-7197 (Ewha Women's University, Korea); Vemurafenib (Plexxikon); Dabrafenib (Genentech/GSK); BMS-777607 (BMS); BLZ945 (Memorial Sloan-Kettering Cancer Centre); Unituxin (dinutuximab, United Therapeutics Corporation); Blincyto (blinatumomab, Amgen); Cyramza (ramucirumab, Eli Lilly); Gazyva (obinutuzumab, Roche/Biogen); Kadcyla (ado-trastuzumab emtansine, Roche/Genentech); Perj eta (pertuzumab, Roche/Genentech); Adcetris (brentuximab vedotin, Takeda/Millennium); Arzerra (ofatumumab, GSK); Vectibix (panitumumab, Amgen); Avastin (bevacizumab, Roche/Genentech); Erbitux (cetuximab, BMS/Merck); Bexxar (tositumomab-I131, GSK); Zevalin (ibritumomab tiuxetan, Biogen); Campath (alemtuzumab, Bayer); Mylotarg (gemtuzumab ozogamicin, Pfizer); Herceptin (trastuzumab, Roche/Genentech); Rituxan (rituximab, Genentech/Biogen); volociximab (Abbvie); Enavatuzumab (Abbvie); ABT-414 (Abbvie); Elotuzumab (Abbvie/BMS); ALX-0141 (Ablynx); Ozaralizumab (Ablynx); Actimab-C(Actinium); Actimab-P (Actinium); Milatuzumab-dox (Actinium); Emab-SN-38 (Actinium); Naptumonmab estafenatox (Active Biotech); AFM13 (Affimed); AFM11 (Affimed); AGS-16C3F (Agensys); AGS-16M8F (Agensys); AGS-22ME (Agensys); AGS-15ME (Agensys); GS-67E (Agensys); ALXN6000 (samalizumab, Alexion); ALT-836 (Altor Bioscience); ALT-801 (Altor Bioscience); ALT-803 (Altor Bioscience); AMG780 (Amgen); AMG228 (Amgen); AMG820 (Amgen); AMG172 (Amgen); AMG595 (Amgen); AMG110 (Amgen); AMG232 (adecatumumab, Amgen); AMG211 (Amgen/MedImmune); BAY20-10112 (Amgen/Bayer); Rilotumumab (Amgen); Denosumab (Amgen); AMP-514 (Amgen); MEDI575 (AZ/MedImmune); MEDI3617 (AZ/MedImmune); MEDI6383 (AZ/MedImmune); MEDI551 (AZ/MedImmune); Moxetumomab pasudotox (AZ/MedImmune); MEDI565 (AZ/MedImmune); MEDI0639 (AZ/MedImmune); MEDI0680 (AZ/MedImmune); MEDI562 (AZ/MedImmune); AV-380 (AVEO); AV203 (AVEO); AV299 (AVEO); BAY79-4620 (Bayer); Anetumab ravtansine (Bayer); vantictumab (Bayer); BAY94-9343 (Bayer); Sibrotuzumab (Boehringer Ingleheim); BI-836845 (Boehringer Ingleheim); B-701 (BioClin); BIIB015 (Biogen); Obinutuzumab (Biogen/Genentech); BI-505 (Bioinvent); BI-1206 (Bioinvent); TB-403 (Bioinvent); BT-062 (Biotest) BIL-010t (Biosceptre); MDX-1203 (BMS); MDX-1204 (BMS); Necitumumab (BMS); CAN-4 (Cantargia AB); CDX-011 (Celldex); CDX1401 (Celldex); CDX301 (Celldex); U3-1565 (Daiichi Sankyo); patritumab (Daiichi Sankyo); tigatuzumab (Daiichi Sankyo); nimotuzumab (Daiichi Sankyo); DS-8895 (Daiichi Sankyo); DS-8873 (Daiichi Sankyo); DS-5573 (Daiichi Sankyo); MORab-004 (Eisai); MORab-009 (Eisai); MORab-003 (Eisai); MORab-066 (Eisai); LY3012207 (Eli Lilly); LY2875358 (Eli Lilly); LY2812176 (Eli Lilly); LY3012217(Eli Lilly); LY2495655 (Eli Lilly); LY3012212 (Eli Lilly); LY3012211 (Eli Lilly); LY3009806 (Eli Lilly); cixutumumab (Eli Lilly); Flanvotumab (Eli Lilly); IMC-TR1 (Eli Lilly); Ramucirumab (Eli Lilly); Tabalumab (Eli Lilly); Zanolimumab (Emergent Biosolution); FG-3019 (FibroGen); FPA008 (Five Prime Therapeutics); FP-1039 (Five Prime Therapeutics); FPA144 (Five Prime Therapeutics); catumaxomab (Fresenius Biotech); IMAB362 (Ganymed); IMAB027 (Ganymed); HuMax-CD74 (Genmab); HuMax-TFADC (Genmab); GS-5745 (Gilead); GS-6624 (Gilead); OMP-21M18 (demcizumab, GSK); mapatumumab (GSK); IMGN289 (ImmunoGen); IMGN901 (ImmunoGen); IMGN853 (ImmunoGen); IMGN529 (Immuno Gen); IMMU-130 (Immunomedics); milatuzumab-dox (Immunomedics); IM MU-115 (Immunomedics); IMMU-132 (Immunomedics); IM MU-106 (Immunomedics); IMMU-102 (Immunomedics); Epratuzumab (Immunomedics); Clivatuzumab (Immunomedics); IPH41 (Innate Immunotherapeutics); Daratumumab (Janssen/Genmab); CNTO-95 (Intetumumab, Janssen); CNTO-328 (siltuximab, Janssen); KB004 (KaloBios); mogamulizumab (Kyowa Hakko Kirrin); KW-2871 (ecromeximab, Life Science); Sonepcizumab (Lpath); Margetuximab (Macrogenics); Enoblituzumab (Macrogenics); MGD006 (Macrogenics); MGF007 (Macrogenics); MK-0646 (dalotuzumab, Merck); MK-3475 (Merck); Sym004 (Symphogen/Merck Serono); DI17E6 (Merck Serono); MOR208 (Morphosys); MOR202 (Morphosys); Xmab5574 (Morphosys); BPC-1C (ensituximab, Precision Biologics); TAS266 (Novartis); LFA102 (Novartis); BHQ880 (Novartis/Morphosys); QGE031 (Novartis); HCD122 (lucatumumab, Novartis); LJM716 (Novartis); AT355 (Novartis); OMP-21M18 (Demcizumab, OncoMed); OMP52M51 (Oncomed/GSK); OMP-59R5 (Oncomed/GSK); vantictumab (Oncomed/Bayer); CMC-544 (inotuzumab ozogamicin, Pfizer); PF-03446962 (Pfizer); PF-04856884 (Pfizer); PSMA-ADC (Progenics); REGN1400 (Regeneron); REGN910 (nesvacumab, Regeneron/Sanofi); REGN421 (enoticumab, Regeneron/Sanofi); RG7221, RG7356, RG7155, RG7444, RG7116, RG7458, RG7598, RG7599, RG7600, RG7636, RG7450, RG7593, RG7596, DCDS3410A, RG7414 (parsatuzumab), RG7160 (imgatuzumab), RG7159 (obintuzumab), RG7686, RG3638 (onartuzumab), RG7597 (Roche/Genentech); SAR307746 (Sanofi); SAR566658 (Sanofi); SAR650984 (Sanofi); SAR153192 (Sanofi); SAR3419 (Sanofi); SAR256212 (Sanofi), SGN-LIV1A (lintuzumab, Seattle Genetics); SGN-CD33A (Seattle Genetics); SGN-75 (vorsetuzumab mafodotin, Seattle Genetics); SGN-19A (Seattle Genetics) SGN-CD70A (Seattle Genetics); SEA-CD40 (Seattle Genetics); ibritumomab tiuxetan (Spectrum); MLN0264 (Takeda); ganitumab (Takeda/Amgen); CEP-37250 (Teva); TB-403 (Thrombogenic); VB4-845 (Viventia); Xmab2512 (Xencor); Xmab5574 (Xencor); nimotuzumab (YM Biosciences); Carlumab (Janssen); NY-ESO TCR (Adaptimmune); MAGE-A-10 TCR (Adaptimmune); CTL019 (Novartis); JCAR015 (Juno Therapeutics); KTE-C19 CAR (Kite Pharma); UCART19 (Cellectis); BPX-401 (Bellicum Pharmaceuticals); BPX-601 (Bellicum Pharmaceuticals); ATTCK20 (Unum Therapeutics); CAR-NKG2D (Celyad); Onyx-015 (Onyx Pharmaceuticals); H101 (Shanghai Sunwaybio); DNX-2401 (DNAtrix); VCN-01 (VCN Biosciences); Colo-Adl (PsiOxus Therapeutics); ProstAtak (Advantagene); Oncos-102 (Oncos Therapeutics); CG0070 (Cold Genesys); Pexa-vac (JX-594, Jennerex Biotherapeutics); GL-ONC1 (Genelux); T-VEC (Amgen); G207 (Medigene); HF10 (Takara Bio); SEPREHVIR (HSV1716, Virttu Biologics); OrienX010 (OrienGene Biotechnology); Reolysin (Oncolytics Biotech); SVV-001 (Neotropix); Cacatak (CVA21, Viralytics); Alimta (Eli Lilly), cisplatin, oxaliplatin, irinotecan, folinic acid, methotrexate, cyclophosphamide, 5-fluorouracil, Zykadia (Novartis), Tafinlar (GSK), Xalkori (Pfizer), Iressa (AZ), Gilotrif (Boehringer Ingelheim), Tarceva (Astellas Pharma), Halaven (Eisai Pharma), Veliparib (Abbvie), AZD9291 (AZ), Alectinib (Chugai), LDK378 (Novartis), Genetespib (Synta Pharma), Tergenpumatucel-L (NewLink Genetics), GV1001 (Kael-GemVax), Tivantinib (ArQule); Cytoxan (BMS); Oncovin (Eli Lilly); Adriamycin (Pfizer); Gemzar (Eli Lilly); Xeloda (Roche); Ixempra (BMS); Abraxane (Celgene); Trelstar (Debiopharm); Taxotere (Sanofi); Nexavar (Bayer); IMMU-132 (Immunomedics); E7449 (Eisai); Thermodox (Celsion); Cometriq (Exellxis); Lonsurf (Taiho Pharmaceuticals); Camptosar (Pfizer); UFT (Taiho Pharmaceuticals); and TS-1 (Taiho Pharmaceuticals).

### Modes of Administration

[0118] Preferably, the compositions of the invention are to be administered to the gastrointestinal tract in order to enable delivery to and/or partial or total colonisation of the intestine with the bacterial strain of the invention. Generally, the compositions of the invention are administered orally, but they may be administered rectally, intranasally, or via buccal or sublingual routes.

[0119] The compositions of the invention may be administered as a foam, as a spray or a gel. The compositions of the invention may be administered as a suppository, such as a rectal suppository, for example in the form of a theobroma oil (cocoa butter), synthetic hard fat (e.g. suppocire, witepsol), glycero-gelatin, polyethylene glycol, or soap glycerin composition.

[0120] The composition of the invention may be administered to the gastrointestinal tract via a tube, such as a nasogastric tube, orogastric tube, gastric tube, jejunostomy tube (J tube), percutaneous endoscopic gastrostomy (PEG), or a port, such as a chest wall port that provides access to the stomach, jejunum and other suitable access ports.

[0121] The compositions of the invention may also be formulated for intravenous, rectal, sublingual, subcutaneous or nasal administration.

[0122] The compositions of the invention may be administered once, or they may be administered sequentially as part of a treatment regimen. For example, the compositions of the invention can be administered daily.

[0123] Sometimes treatment according to the invention can be accompanied by assessment of the patient's gut microbiota. Treatment may be repeated if delivery of and/or partial or total colonisation with the strain of the invention is not achieved such that efficacy is not observed, or treatment may be ceased if delivery and/or partial or total colonisation is successful and efficacy is observed.

[0124] The composition of the invention may be administered to a pregnant animal, for example a mammal such as a human in order to promote the increase in microbiota diversity and/or the stability of the microbiota after the child is born.

[0125] The compositions of the invention may be administered to a patient that has been identified as having an abnormal gut microbiota. For example, the patient may have reduced or absent colonisation by Enterococcus gallinarum or Enterococcus caselliflavus.

[0126] The compositions of the invention may be administered as a food product, such as a nutritional supplement.

[0127] Preferably, the compositions of the invention are for the treatment of humans, although they may be used to treat animals including monogastric mammals such as poultry, pigs, cats, dogs, horses or rabbits. The compositions of the invention may be useful for enhancing the growth and performance of animals. If administered to animals, oral gavage may be used.

[0128] In embodiments of the invention in which a composition comprising a bacterial strain of the species Enterococcus gallinarum is used in therapy in combination with cyclophosphamide, the cyclophosphamide may be administered as part of the composition or it may be administered separately. Where cyclophosphamide is administered separately, it may be given either concurrently (for example during the same visit to a health care professional) or sequentially. It may also be given via the same route as a composition of the invention or it may be administered differently.

[0129] Preferably, cyclophosphamide is administered orally or intravenously (optionally via injection or infusion). Where cyclophosphamide is administered orally, it may be given at a daily dose of 1000 mg or less, 800 mg or less, 500 mg or less, or 200 mg or less. The daily dose may be between 10-500 mg, 50-250 mg or 80-150 mg. Where cyclophosphamide is administered intravenously, it may be given at a daily dose of 500 to 2000 mg.

### Compositions

[0130] Generally, the composition of the invention comprises bacteria. The composition can be formulated in freeze-dried form. For example, the composition of the invention may comprise granules or gelatin capsules, for example hard gelatin capsules, comprising a bacterial strain as described above.

[0131] Alternatively, the composition of the invention may comprise a live, active bacterial culture. The bacterial strain in the composition of the invention has therefore not been inactivated, killed and/or attenuated, for example by heat. The bacterial strain in the composition of the invention can be viable and/or capable of partially or totally colonising the intestine. The composition can comprises a mixture of live bacterial strains and bacterial strains that have been killed.

[0132] The composition of the invention can be encapsulated to enable delivery of the bacterial strain to the intestine. Encapsulation protects the composition from degradation until delivery at the target location through, for example, rupturing with chemical or physical stimuli such as pressure, enzymatic activity, or physical disintegration, which may be triggered by changes in pH. Any appropriate encapsulation method may be used. Exemplary encapsulation techniques include entrapment within a porous matrix, attachment or adsorption on solid carrier surfaces, self-aggregation by flocculation or with cross-linking agents, and mechanical containment behind a microporous membrane or a microcapsule. Guidance on encapsulation that may be useful for preparing compositions of the invention is available in, for example, references [45] and [46].

[0133] The composition may be administered orally and may be in the form of a tablet, capsule or powder. Encapsulated products are preferred because Enterococcus gallinarum are anaerobes. Other ingredients (such as vitamin C, for example), may be included as oxygen scavengers and prebiotic substrates to improve the delivery and/or partial or total colonisation and survival in vivo. Alternatively, the probiotic composition of the invention may be administered orally as a food or nutritional product, such as milk or whey based fermented dairy product, or as a pharmaceutical product.

[0134] The composition may be formulated as a probiotic.

[0135] A composition of the invention includes a therapeutically effective amount of a bacterial strain of the invention. A therapeutically effective amount of a bacterial strain is sufficient to exert a beneficial effect upon a patient. A therapeutically effective amount of a bacterial strain may be sufficient to result in delivery to and/or partial or total colonisation of the patient's intestine. A therapeutically effective amount of a bacterial strain can be established by comparing the ability of the bacterial strain of interest to exert a significant relevant therapeutic effect in an in vitro or in vivo model, as described previously, compared to an untreated control.

[0136] A suitable daily dose of the bacteria, for example for an adult human, may be from about 1×10³ to about 1×10¹¹ colony forming units (CFU); for example, from about 1×10⁷ to about 1×10¹⁰ CFU; in another example from about 1×10⁶ to about 1×10¹⁰ CFU. The composition can contain the bacterial strain in an amount of from about 1×10⁶ to about 1×10¹¹ CFU/g, respect to the weight of the composition; for example, from about 1×10⁸ to about 1×10¹⁰ CFU/g. The dose may be, for example, 1 g, 3 g, 5 g, and 10 g.

[0137] Typically, a probiotic, such as the composition of the invention, is optionally combined with at least one suitable prebiotic compound. A prebiotic compound is usually a non-digestible carbohydrate such as an oligo- or polysaccharide, or a sugar alcohol, which is not degraded or absorbed in the upper digestive tract. Known prebiotics include commercial products such as inulin and transgalacto-oligosaccharides.

[0138] The probiotic composition of the present invention may include a prebiotic compound in an amount of from about 1 to about 30% by weight, respect to the total weight composition, (e.g. from 5 to 20% by weight). Carbohydrates may be selected from the group consisting of: fructo-oligosaccharides (or FOS), short-chain fructo-oligosaccharides, inulin, isomalt-oligosaccharides, pectins, xylo-oligosaccharides (or XOS), chitosan-oligosaccharides (or COS), beta-glucans, arable gum modified and resistant starches, polydextrose, D-tagatose, acacia fibers, carob, oats, and citrus fibers. In one aspect, the prebiotics are the short-chain fructo-oligosaccharides (for simplicity shown herein below as FOSs-c.c); said FOSs-c.c. are not digestible carbohydrates, generally obtained by the conversion of the beet sugar and including a saccharose molecule to which three glucose molecules are bonded.

[0139] The compositions of the invention may comprise pharmaceutically acceptable excipients or carriers. Examples of such suitable excipients may be found in reference [47]. Acceptable carriers or diluents for therapeutic use are well known in the pharmaceutical art and are described, for example, in reference [48]. Examples of suitable carriers include lactose, starch, glucose, methyl cellulose, magnesium stearate, mannitol, sorbitol and the like. Examples of suitable diluents include ethanol, glycerol and water. The choice of pharmaceutical carrier, excipient or diluent can be selected with regard to the intended route of administration and standard pharmaceutical practice. The pharmaceutical compositions may comprise as, or in addition to, the carrier, excipient or diluent any suitable binder(s), lubricant(s), suspending agent(s), coating agent(s), solubilising agent(s). Examples of suitable binders include starch, gelatin, natural sugars such as glucose, anhydrous lactose, free-flow lactose, beta-lactose, corn sweeteners, natural and synthetic gums, such as acacia, tragacanth or sodium alginate, carboxymethyl cellulose and polyethylene glycol. Examples of suitable lubricants include sodium oleate, sodium stearate, magnesium stearate, sodium benzoate, sodium acetate, sodium chloride and the like. Preservatives, stabilizers, dyes and even flavouring agents may be provided in the pharmaceutical composition. Examples of preservatives include sodium benzoate, sorbic acid and esters of p-hydroxybenzoic acid. Antioxidants and suspending agents may be also used.

[0140] The compositions of the invention may be formulated as a food product. For example, a food product may provide nutritional benefit in addition to the therapeutic effect of the invention, such as in a nutritional supplement. Similarly, a food product may be formulated to enhance the taste of the composition of the invention or to make the composition more attractive to consume by being more similar to a common food item, rather than to a pharmaceutical composition. The composition of the invention is formulated as a milk-based product. The term “milk-based product” means any liquid or semi-solid milk- or whey-based product having a varying fat content. The milk-based product can be, e.g., cow's milk, goat's milk, sheep's milk, skimmed milk, whole milk, milk recombined from powdered milk and whey without any processing, or a processed product, such as yoghurt, curdled milk, curd, sour milk, sour whole milk, butter milk and other sour milk products. Another important group includes milk beverages, such as whey beverages, fermented milks, condensed milks, infant or baby milks; flavoured milks, ice cream; milk-containing food such as sweets.

[0141] The compositions of the invention can contain a single bacterial strain or species and may not contain any other bacterial strains or species. Such compositions may comprise only de minimis or biologically irrelevant amounts of other bacterial strains or species. Such compositions may be a culture that is substantially free from other species of organism. The invention may provide a composition comprising one or more strains from the species Enterococcus gallinarum, which does not contain bacteria from any other species or which comprises only de minimis or biologically irrelevant amounts of bacteria from another species for use in therapy.

[0142] The compositions of the invention can comprise more than one bacterial strain or species. For example, the compositions of the invention comprise more than one strain from within the same species (e.g. more than 1, 2, 3, 4, 5, 6, 7, 8, 9, 10, 15, 20, 25, 30, 35, 40 or 45 strains), and, optionally, do not contain bacteria from any other species. The compositions of the invention can comprise less than 50 strains from within the same species (e.g. less than 45, 40, 35, 30, 25, 20, 15, 12, 10, 9, 8, 7, 6, 5, 4 or 3 strains), and, optionally, do not contain bacteria from any other species. The compositions of the invention can comprise 1-40, 1-30, 1-20, 1-19, 1-18, 1-15, 1-10, 1-9, 1-8, 1-7, 1-6, 1-5, 1-4, 1-3, 1-2, 2-50, 2-40, 2-30, 2-20, 2-15, 2-10, 2-5, 6-30, 6-15, 16-25, or 31-50 strains from within the same species and, optionally, do not contain bacteria from any other species. The compositions of the invention can comprise more than one species from within the same genus (e.g. more than 1, 2, 3, 4, 5, 6, 7, 8, 9, 10, 12, 15, 17, 20, 23, 25, 30, 35 or 40 species), and, optionally, do not contain bacteria from any other genus The compositions of the invention can comprise less than 50 species from within the same genus (e.g. less than 50, 45, 40, 35, 30, 25, 20, 15, 12, 10, 8, 7, 6, 5, 4 or 3 species), and, optionally, do not contain bacteria from any other genus. the compositions of the invention comprise 1-50, 1-40, 1-30, 1-20, 1-15, 1-10, 1-9, 1-8, 1-7, 1-6, 1-5, 1-4, 1-3, 1-2, 2-50, 2-40, 2-30, 2-20, 2-15, 2-10, 2-5, 6-30, 6-15, 16-25, or 31-50 species from within the same genus and, optionally, do not contain bacteria from any other genus. The invention can comprises any combination of the foregoing.

[0143] The composition can comprise a microbial consortium. For example, the composition comprises the bacterial strain having a 16S rRNA sequence that is at least 95% identical to SEQ ID NO:2, for example, which is an Enterococcus gallinarum, as part of a microbial consortium. For example, the bacterial strain is present in combination with one or more (e.g. at least 2, 3, 4, 5, 10, 15 or 20) other bacterial strains from other genera with which it can live symbiotically in vivo in the intestine. For example, the composition comprises a bacterial strain having a 16S rRNA sequence that is at least 95% identical to SEQ ID NO:2, for example, which is an Enterococcus gallinarum, in combination with a bacterial strain from a different genus. The microbial consortium can comprises two or more bacterial strains obtained from a faeces sample of a single organism, e.g. a human. The microbial consortium in the composition may not found together in nature. For example, the microbial consortium may comprises bacterial strains obtained from faeces samples of at least two different organisms that could be from the same species, e.g. two different humans, e.g. two different human infants or an infant human and an adult human. The two organisms could also be from different species, for example the two organism are a human and a non-human mammal.

[0144] If the composition of the invention comprises more than one bacterial strain, species or genus, then the individual bacterial strains, species or genera may be administered separately, simultaneously or sequentially. For example the more than one bacterial strains, species or genera are stored separately but are mixed together prior to use.

[0145] The bacterial strain for use in the invention can be obtained from human infant, adolescent or adult faeces. If the composition of the invention comprises more than one bacterial strain, then all of the bacterial strains can be obtained from the human infant, adolescent or adult faeces. The bacteria may have been cultured subsequent to being obtained from the human infant faeces and being used in a composition of the invention.

[0146] The compositions for use in accordance with the invention may or may not require marketing approval.

[0147] Preferably, the composition of the invention comprises lyophilised bacteria. Lyophilisation of bacteria is a well-established procedure and relevant guidance is available in, for example, references [49-51].

[0148] The invention provides the above pharmaceutical composition, wherein said bacterial strain may be spray dried. Preferably, the invention provides the above pharmaceutical composition, wherein the bacterial strain is lyophilised or spray dried and wherein the bacteria is either live, viable, and/or capable of partially or totally colonising the intestine.

[0149] In some cases, the lyophilised or spray dried bacterial strain is reconstituted prior to administration. In some cases, the reconstitution is by use of a diluent described herein.

[0150] The compositions of the invention can comprise pharmaceutically acceptable excipients, diluents or carriers.

[0151] The compositions according to the invention may comprise: a bacterial strain as used in the invention; and a pharmaceutically acceptable excipient, carrier or diluent; wherein the bacterial strain is in an amount sufficient to increase the microbiota diversity in a subject when administered to a subject in need thereof

[0152] The invention can provide a pharmaceutical composition comprising: a bacterial strain as used in the invention; and a pharmaceutically acceptable excipient, carrier or diluent; wherein the bacterial strain is in an amount sufficient to treat a disorder when administered to a subject in need thereof; and wherein the disorder is a decrease in microbiota diversity and/or in the stability of the microbiota in a subject diagnosed with brain, breast, endometrium, ovarian, prostate or colon cancer.

[0153] The amount of the bacterial strain in the composition may be from about 1×10³ to about 1×10¹¹ colony forming units per gram with respect to a weight of the composition.

[0154] The composition may be administered at a dose of 1 g, 3 g, 5 g or 10 g.

[0155] The composition may be administered by a method selected from the group consisting of oral, rectal, subcutaneous, nasal, buccal, and sublingual.

[0156] The composition may comprise a carrier selected from the group consisting of lactose, starch, glucose, methyl cellulose, magnesium stearate, mannitol and sorbitol.

[0157] The composition may comprise a diluent selected from the group consisting of ethanol, glycerol and water.

[0158] The composition may comprise an excipient selected from the group consisting of starch, gelatin, glucose, anhydrous lactose, free-flow lactose, beta-lactose, corn sweetener, acacia, tragacanth, sodium alginate, carboxymethyl cellulose, polyethylene glycol, sodium oleate, sodium stearate, magnesium stearate, sodium benzoate, sodium acetate and sodium chloride.

[0159] The composition may further comprise at least one of a preservative, an antioxidant and a stabilizer. The preservative can be selected from the group consisting of sodium benzoate, sorbic acid and esters of p-hydroxybenzoic acid.

[0160] The composition may be stored in a sealed container at about 4° C. or about 25° C. The container may be placed in an atmosphere having 50% relative humidity, at least 80% of the bacterial strain as measured in colony forming units, remains after a period of at least about: 1 month, 3 months, 6 months, 1 year, 1.5 years, 2 years, 2.5 years or 3 years. The sealed container may be a sachet or bottle. The composition of the invention as described herein can also be provided in a syringe.

[0161] The composition may be provided as a pharmaceutical formulation. For example, the composition may be provided as a tablet or capsule, wherein optionally the capsule is a gelatine capsule (“gel-cap”).

[0162] The compositions of the invention can be administered orally. Oral administration may involve swallowing, so that the compound enters the gastrointestinal tract, and/or buccal, lingual, or sublingual administration by which the compound enters the blood stream directly from the mouth. Pharmaceutical formulations suitable for oral administration include solid plugs, solid microparticulates, semi-solid and liquid (including multiple phases or dispersed systems) such as tablets; soft or hard capsules containing multi- or nano-particulates, liquids (e.g. aqueous solutions), emulsions or powders; lozenges (including liquid-filled); chews; gels; fast dispersing dosage forms; films; ovules; sprays; and buccal/mucoadhesive patches.

[0163] The pharmaceutical formulation can be an enteric formulation, i.e. a gastro-resistant formulation (for example, resistant to gastric pH) that is suitable for delivery of the composition of the invention to the intestine by oral administration. Enteric formulations may be particularly useful when the bacteria or another component of the composition is acid-sensitive, e.g. prone to degradation under gastric conditions. The enteric formulation comprises an enteric coating and can be an enteric-coated dosage form. For example, the formulation may be an enteric-coated tablet or an enteric-coated capsule, or the like. The enteric coating may be a conventional enteric coating, for example, a conventional coating for a tablet, capsule, or the like for oral delivery. The formulation may comprise a film coating, for example, a thin film layer of an enteric polymer, e.g. an acid-insoluble polymer.

[0164] The enteric formulation can be intrinsically enteric, for example, gastro-resistant without the need for an enteric coating. Thus, the formulation is an enteric formulation that does not comprise an enteric coating and the formulation of the capsule can be made from a thermogelling material. The thermogelling material can be a cellulosic material, such as methylcellulose, hydroxymethylcellulose or hydroxypropylmethylcellulose (HPMC). The capsule can also comprise a shell that does not contain any film forming polymer. The shell can comprises hydroxypropylmethylcellulose and does not comprise any film forming polymer (e.g. see [52]). The formulation can be an intrinsically enteric capsule (for example, Vcaps® from Capsugel).

[0165] The formulation can be a soft capsule. Soft capsules are capsules which may, owing to additions of softeners, such as, for example, glycerol, sorbitol, maltitol and polyethylene glycols, present in the capsule shell, have a certain elasticity and softness. Soft capsules can be produced, for example, on the basis of gelatine or starch. Gelatine-based soft capsules are commercially available from various suppliers. Depending on the method of administration, such as, for example, orally or rectally, soft capsules can have various shapes, they can be, for example, round, oval, oblong or torpedo-shaped. Soft capsules can be produced by conventional processes, such as, for example, by the Scherer process, the Accogel process or the droplet or blowing process.

### Culturing Methods

[0166] The bacterial strains for use in the present invention can be cultured using standard microbiology techniques as detailed in, for example, references [53-55].

[0167] The solid or liquid medium used for culture may be YCFA agar or YCFA medium. YCFA medium may include (per 100 ml, approximate values): Casitone (1.0 g), yeast extract (0.25 g), NaHCO₃(0.4 g), cysteine (0.1 g), K₂HPO₄ (0.045 g), KH₂PO₄ (0.045 g), NaCl (0.09 g), (NH₄)₂SO₄ (0.09 g), MgSO₄·7H₂O(0.009 g), CaCl₂) (0.009 g), resazurin (0.1 mg), hemin (1 mg), biotin (1 μg), cobalamin (1 μg), p-aminobenzoic acid (3 μg), folic acid (5 μg), and pyridoxamine (15 μg).

### Bacterial Strains for Use in Vaccine Compositions

[0168] The inventors have identified that the bacterial strains of the invention are useful for increasing and/or stabilising the microbiota diversity in a subject. This is likely to be a result of the effect that the bacterial strains of the invention have on the host immune system. Therefore, the compositions of the invention, in addition to maintaining and/or improving the microbiota diversity of a subject may also advantageously have the effect of treating or preventing cancer, when administered as vaccine compositions. The bacterial strains of the invention can be viable and/or capable of partially or totally colonising the intestine. The bacterial strains of the invention may also be killed, inactivated or attenuated. The compositions for use in a vaccine may comprise a vaccine adjuvant and can be administered via injection, such as via subcutaneous injection.

### General

[0169] The practice of the present invention will employ, unless otherwise indicated, conventional methods of chemistry, biochemistry, molecular biology, immunology and pharmacology, within the skill of the art. Such techniques are explained fully in the literature. See, e.g., references [56] and [57-63], etc.

[0170] The term “comprising” encompasses “including” as well as “consisting” e.g. a composition “comprising” X may consist exclusively of X or may include something additional e.g. X+Y.

[0171] The term “about” in relation to a numerical value x is optional and means, for example, x±10%.

[0172] The word “substantially” does not exclude “completely” e.g. a composition which is “substantially free” from Y may be completely free from Y. Where necessary, the word “substantially” may be omitted from the definition of the invention.

[0173] Unless specifically stated, a process or method comprising numerous steps may comprise additional steps at the beginning or end of the method, or may comprise additional intervening steps. Also, steps may be combined, omitted or performed in an alternative order, if appropriate.

[0174] Various embodiments of the invention are described herein. It will be appreciated that the features specified in each embodiment may be combined with other specified features, to provide further embodiments. In particular, embodiments highlighted herein as being suitable, typical or preferred may be combined with each other (except when they are mutually exclusive).

### MODES FOR CARRYING OUT THE INVENTION

### Methodology

### Bacterial Strains

[0175] MRX518—Enterococcus gallinarum strain, NCIMB 42488
MRX0554—Enterococcus gallinarum strain, NCIMB 42761
MRX0858—Enterococcus caselliflavus strain
REF 10—Enterococcus gallinarum strain, DSM100110

### 16S Amplicon Sequencing

[0176] A Qiagen DNeasy Blood & Tissue Kit was used following the manufacturer's instructions, to extract microbial DNA from 0.2 g of frozen faecal samples from treated EMT6-mice at Day-14, Day 0 and Day 22.

[0177] Preparation and sequencing of the 16S rRNA gene amplicons was carried out using the 16S Sequencing Library Preparation Nextera protocol developed by Illumina (San Diego, Calif., USA). 50 ng of each of the DNA faecal extracts was amplified using PCR and primers targeting the V3/V4 variable region of the 16S rRNA gene. The products were purified and forward and reverse barcodes were attached by a second round of adapter PCR. The resulting PCR products were purified, quantified and equimolar amounts of each amplicon were then pooled before being sent for sequencing to the commercial Supplier GATC GmbH, on either the MiSeq (2×250 bp chemistry) or HiSeq (2×300 bp chemistry) platforms.

### Microbiome Composition Data Analysis (Post-Sequencing)

[0178] The raw sequence data was merged and trimmed using the flash methodology. This generates a single read from the read pairs and filters out low quality reads. The USEARCH pipeline methodology (version 8.1.1861_i86_linux64) was used to identify singleton sequences that are only represented by one read and to hide them from the OTU (Operational Taxonomic Unit) generating step. This is done due to the likelihood that these reads do not represent true biological variation but instead are due to technical variation. The UPARSE algorithm was then used to cluster the sequences into OTUs at 97% similarity. This generates a list of representative sequences which reflect the sequence variation within the dataset. These representative sequences were assigned to taxonomic level using the RDP classifier for phylum to family level and the APC associated SPINGO classifier was used for the genus and species level.

[0179] Chimeric sequences are sequences that originate from two or more biologically distinct transcripts. Chimeric sequences occur when two sequences combine to generate a new sequence due to annealing of the 16S sequences which share a high level of similarity, even when the origin of these sequences are from phylogenetically distinct origins. These chimeric sequences were removed using the UCHIME chimera removal algorithm with the Chimeraslayer reference database (downloaded: 9th September 2016). The USEARCH global alignment algorithm was then used to map all reads, including singletons onto the remaining OTU sequences, which now reflect the true taxonomic variation of the initial samples. Individual sequences were grouped into OTUs to give microbiome compositional information (abundance and diversity). These steps allowed the abundance of each taxa in each sample to be estimated.

### High-Level Data Analysis

[0180] Alpha diversity was investigated using 1) the Shannon diversity index, which represents the number of taxa (richness) and their relative abundances (evenness) within each sample and 2) the number of observed species per sample (richness), using the phyloseq library.

[0181] To establish whether there were significant differences in the global microbiome profiles between groups, Permutational MANOVA was performed on the dissimilarity matrix using the Adonis function in R. Boxplots were constructed using the strip chart and boxplot functions in the R statistical software.

[0182] A negative binomial statistical methodology (DESeq2 methodology) was used to identify taxonomic variables that were significantly differentially abundant within chosen comparisons. Raw P-values produced were adjusted for multiple testing using the Benjamini/Hochberg methodology.

### Example 1—Changes in Microbiota after Enterococcus gallinarum Treatment

### Summary

[0183] The effect of Enterococcus gallinarum and Enterococcus caselliflavus on the diversity and stability of microbiota was tested in a mouse model.

### Study Design

[0184] Mice from a breast cancer model (EMT6) (n=40) were treated with either bacterial strains MRX518, MRX0554, MRX0858 or REF 10 at a concentration of 2×10⁸; anti-CTLA4 at a concentration of 10 mL/kg. The mice were treated with the respective bacterial strain on Day-14, inoculated with tumour cells on Day 0. Anti-CTLA4 was administered on D13 of the study. Faecal samples were collected at three time points during the study, Day-14, Day 0 and Day 22 (end of the study). Across the whole study 120 faecal samples were collected.

[0185] No data were returned on 9 samples as they either failed to amplify pre-sequencing or the number of reads returned from sequencing was too low for analysis. In total data was returned for n=111 samples. Table 1 summarises the number of samples successfully returned for each treatment group at each time point.

TABLE 1
Number of samples for each treatment
group and time point where data were returned.

| | | | | | Anti- |
|---|---|---|---|---|---|
| Treatment | MRX518 | MRX0554 | MRX0858 | REF 10 | CTLA4 |
| Day -14 | n = 8 | n = 8 | n = 8 | n = 8 | n = 7 |
| (bacterization) | | | | | |
| Day 0 | n = 8 | n = 5 | n = 7 | n = 7 | n = 8 |
| (tumour cell | | | | | |
| inoculation) | | | | | |
| Day 22 | n = 7 | n = 8 | n = 6 | n = 8 | n = 8 |
| (end of study) | | | | | |

### Results

### Changes in Microbiota Diversity

[0186] The effect of treatment on the microbiota diversity at Day-14, Day 0 and Day 22 can be seen in FIGS. 1a-j. These figures are consistent with an increase in diversity being observed after treatment with Enterococcus gallinarum or Enterococcus caselliflavus bacterial strains. For example, FIGS. 1a-d and FIGS. 1g-h show that the microbiome diversity increased in mice who were treated with Enterococcus gallinarum bacterial strains. FIGS. 1e-f show that treatment with Enterococcus caselliflavus can also increase the microbiome diversity in mice.

[0187] This increased diversity is maintained across the study, which is consistent with the ability of these bacterial strains to maintain the stability of the microbiome. For example, the microbiome diversity at Day 22 in FIGS. 1a-d and FIGS. 1e-f are similar to that observed at Day 0. This shows that Enterococcus gallinarum bacterial strains are able to maintain the stability of the microbiome.

### Variation in Taxa

[0188] The data disclosed in GB1712857.0 were reanalysed. Significantly differentially abundant taxa were observed in the treated groups at all three time points (Day-14, Day 0 and Day 22) when compared to a control group as shown below in Table 2 (p-value<0.05). ↑ indicates a significant increase of the taxa in the treated group and ↓ indicates a significant decrease of the taxa in the treated group. The quoted figures reflect the change in abundance (log 2 fold change). The number of differentially abundant taxa found in each treatment group at each time point are summarised in Table 3.

TABLE 2
Differentially abundant taxa found in each treatment group when
compared to a vehicle control at time points Day −14, Day 0 and Day 22 in EMT6 mice.

| | MRX518 | MRX554 | MRX858 | REF 10 | Anti-CTLA4 |
|---|---|---|---|---|---|
| Day | Eubacterium | Clostridium | 0 | 0 | Roseburia faecis |
| −14 | dolichum (↑, 3.565) | XIVa (↓, −4.599) | | | (↓, −3.98) |
| | | | | | Clostridium |
| | | | | | polysaccharolyticum |
| | | | | | m (↓, −5.131) |
| | | | | | Clostridium XIVa |
| | | | | | (↓ 4.806) |
| Day | Barnesiella | Clostridium | Roseburia (↑, 2.554) | 0 | 0 |
| 0 | intestinihominis (↓, −3.666) | XIVa (↓, −4.396) | Clostridium | | |
| | Oscillospira | | XIVa (↓, −2.227) | | |
| | guilliermondii (↑, 2.024) | | Lachnospiraceae | | |
| | Odoribacter | | (↑, 3.392) | | |
| | splanchnicus (↓, −3.094) | | Clostridium | | |
| | | | XIVa (↑, 4.676) | | |
| Day | Lachnospiraceae (↑, 3.483) | Clostridium | Clostridium | Clostridium | Clostridium XIVa |
| 22 | Clostridium XIVa (↓, −3.035) | XIVa (↓, −6.731) | XIVa (↑, 3.594) | XIVa (↑, 3.105) | (↓, −6.145) |
| | Firmicutes (↑, 4.253) | Clostridium | Clostridium | Eubacterium | Lachnospiraceae |
| | Lachnospiraceae (↑, 3.137) | XIVa (↓, −6.860) | XIVa (↓, −5.858) | (↓, −4.999) | (↑, 3.556) |
| | Clostridium XIVa (↓, −6.038) | Clostridium | Clostridium | Clostridium | Clostridium XIVa |
| | Eubacterium (↓, −2.373) | saccharolytic | XIVa (↓, −6.077) | XIVa (↓, −6.365) | (↓, −6.333) |
| | Clostridium XIVa (↓, −4.003) | um (↓, −4.884) | Clostridium | Lachnospiraceae | Clostridium |
| | Bacteroides | | saccharolyticum | (↓, −4.157) | saccharolyticum |
| | acidifaciens (↑, 2.880) | | (↓, −4.039) | Lachnospiraceae | (↓, −4.576) |
| | Barnesiella | | | (↑, 3.246) | |
| | intestinihominis (↓, −3.062) | | | Clostridium | |
| | | | | XIVa (↓, −4.213) | |

TABLE 3
Number of differentially abundant taxa found in
each treatment group between the study time points.

| | D-14 → D0 | D0 → D22 | D-14 → D22 |
|---|---|---|---|
| MRX518 | 13 | 13 | 17 |
| MRX0554 | 2 | 0 | 2 |
| MRX0858 | 13 | 0 | 11 |
| REF10 | 11 | 7 | 14 |
| Anti-CTLA4 | 1 | 9 | 31 |

[0189] After treatment with the bacterial strains E. gallinarum or E. caselliflavus the diversity of the microbiota increases and this increase includes increases in the abundance of Lachnospiraceae and Roseburia. One group of organisms for which there is a decrease in abundance is Clostridium XIVa Spp.

[0190] The data are consistent with the treatment E. gallinarum or E. caselliflavus leading to a more stabilised microbiome.

### Example 2—Changes in Microbiota Diversity after Enterococcus gallinarum or Enterococcus caselliflavus Treatment

### Summary

[0191] The effect of Enterococcus gallinarum or Enterococcus caselliflavus on the diversity and stability of microbiota was tested.

### Study Design

[0192] Mice from a lung cancer model (LLC) (n=48) were treated with either bacterial strains MRX518, MRX0554, MRX0858 of REF 10 at a concentration of 2×10⁸; anti-CTLA4 at a concentration of 10 mL/kg or were untreated. The mice were treated with the respective bacterial strain on Day-14, inoculated with tumour cells on Day 0, if relevant anti-CTLA4 was administered on D13 of the study. Faecal samples were collected at the end of the study on Day 18.

[0193] No data were returned on 11 samples as either the mice had died before the collection date or the sample failed to amplify pre-sequencing. In total data were returned for n=37 samples. Table 4 summarises the number of samples successfully returned for each treatment group at each time point.

TABLE 4:
Number of samples for each treatment group
and time point where data was returned.

| | | | | | | Anti- |
|---|---|---|---|---|---|---|
| | Untreated | MRX518 | MRX0554 | MRX0858 | REF10 | CTLA4 |
| D 18 (end of | n = 5 | n = 5 | n = 7 | n = 7 | n = 6 | n = 7 |
| treatment) | | | | | | |

### Results

### Changes in Microbiota Diversity

[0194] The effect of treatment on the change in microbiota diversity at Day 18 can be seen in FIG. 2. The Shannon diversity index increased after treatment with MRX518 and MRX0858 compared to the untreated control, which is consistent with the ability of E. gallinarum or E. caselliflavus bacterial strains to increase the diversity of the microbiota. A decrease in diversity was observed after treatment with MRX554. This data, however is likely due to experimental error, because FIGS. 1c-d show that this bacterial strain is capable of increasing the microbiome diversity.

### Variation in Taxa

[0195] The data disclosed in GB1712857.0 were reanalysed. DESeq2 analysis revealed differentially abundant taxa in treated groups when compared to a control group as shown in Table 5 below. ↑ indicates a significant increase of the taxa in the treated group and ↓ indicates a significant decrease of the taxa in the treated group. The quoted figures reflect the change in abundance (log 2 fold change).

TABLE 5
Number of differentially abundant taxa per treatment
group when compared to a vehicle control at D18.

| MRX518 | MRX554 | MRX858 | REF 10 | Anti-CTLA4 |
|---|---|---|---|---|
| Clostridium | Clostridium XIVa | Alistipes | Gordonibacter | Clostridium XIVa |
| disporicum (↓, −3.853) | (↑, 5.162) | massiliensis (↓, −6.215) | pamelaeae (↑, | (↓, −4.845) |
| Lactobacillus (↑, 2.356) | Barnesiella | Alistipes | 4.265) | Ruminococcaceae |
| Alloprevotella | intestinihominis | massiliensis (↓, −7.733) | | (↓, −3.044) |
| rava (↑, 2.397) | (↑, 4.180) | Barnesiella | | Clostridium |
| Barnesiella | Lachnospiracea | intestinihominis (↑, 6.473) | | disporicum (↓, −6.256) |
| intestinihominis | Incertae sedis (↑, 4.303) | Turicibacter | | Ruminococcus (↑, 3.049) |
| (↑, 7.134) | Barnesiella | sanguinis (↑, 3.081) | | Acetatifactor muris |
| Eubacterium (↑, 3.548) | intestinihominis | Gordonibacter | | (↑, 3.439) |
| Roseburia | (↑, 5.978) | pamelaeae (↑, 5.246) | | Roseburia |
| intestinalis (↓, −2.911) | Clostridium viride | Alistipes (↓, −4.532) | | intestinalis (↓, −5.368) |
| Eubacterium | (↓, −3.939) | | | Eubacterium |
| ramulus (↓, −2.430) | Gordonibacter | | | ramulus (↓, −2.571) |
| Barnesiella | pamelaeae (↑, 4.095) | | | Roseburia faecis (↑, 3.251) |
| intestinihominis | | | | Lachnospiraceae (↓, −2.699) |
| (↑, 3.392) | | | | Clostridium |
| Barnesiella | | | | lavalense (↓, −1.747) |
| intestinihominis | | | | Clostridium XIVa |
| (↑, 3.716) | | | | (↓, −4.036) |
| Barnesiella | | | | Clostridium viride |
| intestinihominis | | | | (↓, −3.991) |
| (↑, 3.157) | | | | Eubacterium |
| Barnesiella | | | | plexiclaudatum (↓, −3.199) |
| intestinihominis | | | | Barnesiella |
| (↑, 2.298) | | | | intestinihominis (↑, 2.443) |
| Gordonibacter | | | | Eubacterium |
| pamelaeae (↑, 4.528) | | | | plexicaudatum (↓, −2.976) |
| Akkermansia | | | | Clostridium XIVa |
| muciniphila (↑, 5.431) | | | | (↑, 4.097) |
| | | | | Turicibacter |
| | | | | sanguinis (↑, 3.371) |
| | | | | Olsenella profusa (↑, 3.197) |
| | | | | Clostridium XIVa |
| | | | | (↓, −3.626) |
| | | | | Eubacterium |
| | | | | siraeum (↑, 3.341) |

[0196] Treatment with the bacterial strains E. gallinarum or E. caselliflavus can increase the diversity of the microbiota, in particular the proportion of Lachnospiraceae and Roseburia (PMID: 26416813)

[0197] Clostridium Cluster XIVa spp., are decreased after the treatment with the bacterial strains E. gallinarum or E. caselliflavus.

[0198] Treatment further resulted in selective enrichment of Barnesiella intestinihominis. This strain has previously been shown to increase IFN-γ-producing γδT cells in tumours and induce specific-memory Th1 cell immune responses, thus providing an additional mechanism of immunostimulation [38]. Thus, when administered to subjects, the compositions of the present invention will not only function to stabilise and/or improve the microbiota diversity of those subjects, but also promote the growth of an organism demonstrated as having an anticancer effect, which is particularly advantageous if those subjects are cancer patients, or subjects identified as being at risk of cancer.

### Example 3—Stability Testing

[0199] A composition described herein containing at least one bacterial strain described herein is stored in a sealed container at 25° C. or 4° C. and the container is placed in an atmosphere having 30%, 40%, 50%, 60%, 70%, 75%, 80%, 90% or 95% relative humidity. After 1 month, 2 months, 3 months, 6 months, 1 year, 1.5 years, 2 years, 2.5 years or 3 years, at least 50%, 60%, 70%, 80% or 90% of the bacterial strain shall remain as measured in colony forming units determined by standard protocols.

### Example 4—Metabolomics Analysis

### Summary

[0200] The effect of Enterococcus gallinarum on the metabolomic profile of microbiota in mice was investigated.

### Study Design

[0201] Mice from a breast cancer model (EMT6) were treated with a concentration of 2×10⁸ in 200μl of MRX518 (n=9), MRx0518 (n=8), MRx0554 (n=8), MRx0858 (n=8), or REF10-DSM100110 (n=8) at; or received anti-CTLA4 (n=8) at a concentration of 10 mL/kg. Dosing with the bacterial species commenced on Day-14. The mice were engrafted with tumour cells on day DO. Treatment with anti-CTLA-4 antibody (10 mg/kg, IP) was initiated when tumours reached a volume of 50-70 mm³. Tumour volumes were measured every 3-4 days

[0202] Caecal content was isolated from snap frozen caecum and short chain fatty acids, polar and lipid metabolites extracted separately from the faecal slurry. The extracts were analysed by GC-MS (short chain fatty acids) and LC-MS analysis using HILIC (polar metabolites) and UPLC (lipid metabolites). Data was analysed through statistical t-tests with Benjamini-Hochberg correction at a false discovery rate of 10%, in order to compare the untreated group to all other groups. Metabolites were statistically significant if the p value was less than the Benjamini-Hochberg critical value calculated for each compound (i/m)Q.

[0203] Mice treated with MRX518 had significant differences in their metabolite profiles (Table 6). In contrast, anti-CTLA-4 treatment was not associated with any changes in metabolite production. Furthermore, metabolites along the whole pentose phosphate pathway are decreased during MRx0518 and MRx0554 treatment.

[0204] Mice treated with MRx0518 and MRx0554 also showed a decrease in members of the pentose phosphate pathway including ribose 5-phosphate, erythrose 4-phosphate and sedoheptulose 7-phosphate. As discussed above, this is advantageous as high expression levels of members of this pathway is associated with poor outcome in cancer patients and thus, when the compositions of the invention are administered to stabilise and/or enhance the microbiota stability of such patients, those compositions will additionally contribute to the prevention or treatment of cancer.

TABLE 6
Polar, SCFA and lipid metabolites that were significantly different between the MRx0518
group or anti-CTLA-4 group compared to the untreated control group.

| | Group 3 | Group 4 | Group 5 | Group 6 | Group 7 |
|---|---|---|---|---|---|
| | (MRx0518) | (MRx0554) | (MRx0858) | (REF10) | (Anti-CTLA4) |
| Polar | Neu5AC ↑↑ | ManNAc ↑ | ManNAc ↑ | ManNAc ↑ | None |
| Metabolites | Glutamine ↑ | Cytidine ↑ | Cytidine ↑ | Cytidine ↑ | |
| (positive | Serine ↑ | Serine ↑ | | Glutamine ↑ | |
| ionisation) | Plus 12 | Betaine ↑ | | Serine ↑ | |
| | unidentified | Neu5AC ↑ | | Neu5AC ↑ | |
| | metabolites | Glutamine ↑ | | Histidine ↑ | |
| | | (iso)leucine ↑ | | Plus 6 | |
| | | Histidine ↑ | | unidentified | |
| | | Proline ↑ | | metabolites | |
| | | Aspartic acid ↑ | | | |
| | | Citruline ↑ | | | |
| | | Plus 11 | | | |
| | | unidentified | | | |
| | | metabolites | | | |
| Polar | Glucose 1- | Glucose 1- | None | None | None |
| Metabolites | Phosphate ↓ | Phosphate ↓ | | | |
| (negative | Sedoheptulose- | Sedoheptulose-7- | | | |
| ionisation) | 7-phosphate ↓ | phosphate ↓ | | | |
| | Glucose 6- | Glucose 6- | | | |
| | Phosphate ↓ | Phosphate ↓ | | | |
| | Ribose 5- | Ribose 5- | | | |
| | Phosphate ↓ | Phosphate ↓ | | | |
| | Erythrose-4- | Erythrose-4- | | | |
| | phosphate ↓ | phosphate ↓ | | | |
| | Plus 145 | Pantothenic acid ↑ | | | |
| | unidentified | Plus 23 | | | |
| | metabolites | unidentified | | | |
| | | metabolites | | | |
| Short Chain | Butyrate ↓ | Butyrate ↓ | None | None | None |
| Fatty Acid | | | | | |
| Metabolites | | | | | |
| Lipid | 3 unidentified | None | 2 lipids | None | None |
| Metabolites | metabolites | | | | |
| (positive | | | | | |
| ionisation) | | | | | |
| Lipid | 68 lipids | 6 lipids | 2 lipids | None | None |
| Metabolites | | | | | |
| (negative | | | | | |
| ionisation) | | | | | |

### Example 5—Changes in Microbiota after Enterococcus gallinarum Treatment

### Study Design

[0205] Healthy female Balb/C (BALB/cByJ) mice (n=210), 5-7 weeks old, were obtained from CHARLES RIVER (L′Arbresles) and injected with EMT-6 tumour cells to create a model for breast cancer. The study was made up of 7 treatment groups with 10 mice in each group sampled at 3 timepoints (D-15, D-1 and D22). The treatment groups were:

| Group | Treatment |
|---|---|
| G1 | Untreated |
| G2 | YCFA |
| G3 | MRx0518 |
| G4 | Anti-PD1 |
| G5 | Anti-PD1+ MRx0518 |
| G6 | Anti-CTLA4 |
| G7 | Anti-CTLA4 + MRx0518 |

[0206] The mice were treated with 2×10⁸ MRX518 via oral gavage on Day-15. On day-1 (D-1) the mice were engrafted with EMT-6 tumour cells by a subcutaneous injection of 1×10⁶ EMT-6 cells in 200 μL RPMI 1640 into the right flank. Anti-CTLA4 (BE0131, Bioxcell) and PD-1 were administered on D13 of the study by injection into the peritoneal cavity of mice at a volume of 10 m1/kg adjusted to the most recent individual body weight of mice. Faecal samples were collected at three time points during the study, Day-15, Day-1 and Day 22 (end of the study).

### Generation of Microbiome Composition Data—16S Amplicon Sequencing

[0207] A Pre-processing of the data was accomplished using an adaptation of our in-house pipeline. The quality of the reads returned from sequencing was poor, meaning a stringent quality filtering step was added. The Trimmomatic tool (v0.36) was used for trimming and quality filtering. The first 16 and 20 base pairs were removed from the forward and reverse reads respectively, to remove primer sequences. Following this, leading or trailing base pairs falling below a Phred quality score of 25 were trimmed. Next, a sliding window of 4 was applied to the data of and if the reads in the window fell below an average Phred score of 22 the end of the read was removed. If, after the previous quality trimming steps, one or both of a read pair fell below 180 base pairs then the read pair was removed. After quality filtering, the next step was to merge the reads using the FLASH tool (v1.2.11). This generates a single read from the read pairs while filtering out read pairs that do not combine.

### Microbiome Composition Data Analysis (Post-Sequencing)

[0208] Taxonomic classification of the representative OTU sequences was performed using QIIME (v1.9.1) and SPINGO (v1.3). The QIIME assign_taxonomy.py script was used to assign taxonomy to genus level by reference to the RDP 11.2 database. The SPINGO tool was used to assign species level classification. Any classifications with a bootstrap confidence below 0.8 were assigned the label “unclassified”.

TABLE 7
Dataset statistics.

| | |
|---|---|
| Number of samples | 210 |
| Read depth per sample | 17871 (6884.056) |
| (mean (standard deviation)) | |
| Number of OTUs generated | 4181 |

1 sample, 89794_D_15, had very low sequence depth of 1,086. Therefore all samples of animal 89794 were removed from diversity calculations.

### High-Level Data Analysis

[0209] Analysis was performed using R v3.4.3 statistical software. Compositional dissimilarity of the dataset was investigated using the Bray-Curtis dissimilarity metric. The Bray-Curtis metric was calculated on proportion-normalised data using the vegdist function from the vegan package. Principal Coordinate Analysis (PCoA) ordination plots were created to visualise the effect of the different treatments on taxa composition. The PCoA plots were created using the made4 and ggplot2 packages. Permutational MANOVA statistical tests on the Bray-Curtis dissimilarity were performed using the adonis function from the vegan package.

### Results

[0210] The differential abundance of taxa was tested using the R package DESeq2. The full dataset was modelled in such a way that the treatment effects were compared to the YCFA control. The tests were performed at the OTU level and at each of 5 levels of taxonomic classification: Phylum, Class, Order, Family and Genus. Taxa were deemed to be significant with an adjusted p-value of less than 0.05. Only taxa with a log fold change of greater than 0.5 were deemed to be reliable. This was repeated at each timepoint. There were no significant taxa at D-15. Significant taxa for D-1 and D22 are shown in Table 8 and Table 9, respectively. A positive log fold change indicates a taxa is increased in the treatment group compared to the vehicle.

TABLE 8
Differentially abundant taxa observed in each treatment group when compared to YCFA (vehicle) at D −1.

| | | | Classification | | Log2 fold | St. | Adjusted |
|---|---|---|---|---|---|---|---|
| Level | Treatment | Taxa | Level | Classification | change | error | p-value |
| Genus | Anti-CTLA4 | Anaerotruncus | NA | NA | −1.290 | 0.38 | 0.028 |
| OTU_Table | MRx0518 | OTU_50 | Family | Lachnospiraceae | 4.780 | 1.13 | 0.043 |
| OTU_Table | MRx0518 | OTU_121 | Genus | Bamesiella | 2.120 | 0.44 | 0.004 |
| OTU_Table | Anti-PD1 | OTU_121 | Genus | Bamesiella | 2.237 | 0.48 | 0.014 |
| OTU_Table | Anti-PD1 | OTU_354 | Family | Lachnospiraceae | 5.245 | 1.17 | 0.014 |
| OTU_Table | Anti-CTLA4 | OTU_77 | Family | Lachnospiraceae | −24.844 | 3.91 | 8.21E−07 |
| OTU_Table | Anti-CTLA4 | OTU_79 | Class | Clostridia | −1.398 | 0.32 | 0.014 |
| OTU_Table | Anti-CTLA4 | OTU_121 | Genus | Bamesiella | 2.382 | 0.48 | 0.002 |
| OTU_Table | Anti-CTLA4 | OTU_186 | Family | Lachnospiraceae | 4.196 | 0.98 | 0.017 |

TABLE 9
Differentially abundant taxa observed in each treatment group when compared to YCFA (vehicle) at D 22.

| | | | Classification | | Log2 fold | St. | Adjusted |
|---|---|---|---|---|---|---|---|
| Level | Treatment | Taxa | Level | Classification | change | error | p-value |
| Phylum | Anti-PD1 | Deferribacteres | NA | NA | 1.556 | 0.559 | 0.048 |
| Phylum | Anti-CTLA4 | Deferribacteres | NA | NA | 1.470 | 0.559 | 0.039 |
| Phylum | Anti-CTLA4 | Tenericutes | NA | NA | −2.587 | 0.741 | 0.004 |
| Class | Anti-PD1 | Deferribacteres | NA | NA | 1.526 | 0.559 | 0.044 |
| Class | Anti-PD1 | unclassified | NA | NA | −1.004 | 0.313 | 0.019 |
| Class | Anti-CTLA4 | Mollicutes | NA | NA | −2.583 | 0.761 | 0.010 |
| Class | Anti-CTLA4 | unclassified | NA | NA | −0.954 | 0.313 | 0.016 |
| Order | Anti-PD1 | Anaeroplasmatales | NA | NA | −2.182 | 0.774 | 0.041 |
| Order | Anti-PD1 | unclassified | NA | NA | −1.198 | 0.365 | 0.017 |
| Order | Anti-CTLA4 | Anaeroplasmatales | NA | NA | −2.997 | 0.775 | 0.002 |
| Order | Anti-CTLA4 | unclassified | NA | NA | −1.286 | 0.365 | 0.004 |
| Family | Anti-PD1 | Anaeroplasmataceae | NA | NA | −2.232 | 0.764 | 0.043 |
| Family | Anti-PD1 | unclassified | NA | NA | −1.185 | 0.407 | 0.043 |
| Family | Anti-CTLA4 | Anaeroplasmataceae | NA | NA | −2.981 | 0.764 | 0.002 |
| Family | Anti-CTLA4 | Desulfovibrionaceae | NA | NA | 0.972 | 0.348 | 0.042 |
| Family | Anti-CTLA4 | unclassified | NA | NA | −1.200 | 0.407 | 0.039 |
| Genus | Anti-CTLA4 | Anaeroplasma | NA | NA | −3.042 | 0.774 | 0.004 |
| OTU_Table | MRx0518 | OTU_125 | Family | Lachnospiraceae | 8.098 | 1.825 | 0.012 |
| OTU_Table | MRx0518 | OTU_2853 | Genus | Alistipes | 2.062 | 0.469 | 0.012 |
| OTU_Table | Anti-CTLA4 | OTU_125 | Family | Lachnospiraceae | 9.871 | 2.022 | 0.002 |

[0211] FIG. 3(c) shows a trend in the taxa associated with MRx0518 treatment. The mice treated with MRx0518 are clustered at the top of the coordination plot and have positive PC2 values, whereas the other treatments are clustered at the bottom of the coordination plot and have negative PC2 values. This is also shown in FIG. 3(a). FIG. 3(b) shows the taxa before treatment. It is evident that this clustering occurs only after treatment with MRx0518.

[0212] A complementary analysis was performed to identify taxa associated with the MRx0518 response as visualised on the second axis in the ordination plot in FIG. 3. This analysis shows the differences in taxa associated with the MRx0518 response observed at day 22.

[0213] This analysis consisted of a spearman correlation analysis as performed in R using the cor.test function. Only significant taxa are shown with a positive rho indicating that these taxa are associated with the trend and a negative rho indicating that the taxa are inversely associated.

[0214] Table 6 shows the taxa that are significantly different compared to the vehicle control (YFCA) at the D22 time point. These data confirm that treatment with MRx0518 leads to an increase in the abundance of Barnesiella species. The compositions of the invention are capable of increasing the levels of Barnesiella species, which have been implicated in cyclophosphamide efficacy.

TABLE 10
Taxa observed to be associated with MRx0518 treatment at D 22.

| | p.value | Rho |
|---|---|---|
| Alistipes | 1.77E−05 | −0.571 |
| Prevotella | 0.000332 | 0.491 |
| Parabacteroides | 0.00183 | 0.441 |
| Hallella | 0.00553 | 0.404 |
| Anaerotruncus | 0.0126 | 0.375 |
| Bacteroides | 0.0136 | 0.366 |
| Flavonifractor | 0.045 | 0.318 |
| Clostridium XIVb | 0.0451 | 0.308 |
| Vampirovibrio | 0.0451 | 0.313 |
| Anaeroplasma | 0.0487 | 0.301 |
| Barnesiella | 0.0487 | 0.297 |

Sequences

SEQ ID NO: 1 (Enterococcus gallinarum 16S rRNA gene - AF039900)

| | |
|---|---|
| 1 | taatacatgc aagtcgaacg ctttttcttt caccggagct tgctccaccg aaagaaaaag |
| 61 | agtggcgaac gggtgagtaa cacgtgggta acctgcccat cagaagggga taacacttgg |
| 121 | aaacaggtgc taataccgta taacactatt ttccgcatgg aagaaagttg aaaggcgctt |
| 181 | ttgcgtcact gatggatgga cccgcggtgc attagctagt tggtgaggta acggctcacc |
| 241 | aaggccacga tgcatagccg acctgagagg gtgatcggcc acactgggac tgagacacgg |
| 301 | cccagactcc tacgggaggc agcagtaggg aatcttcggc aatggacgaa agtctgaccg |
| 361 | agcaacgccg cgtgagtgaa gaaggttttc ggatcgtaaa actctgttgt tagagaagaa |
| 421 | caaggatgag agtagaacgt tcatcccttg acggtatcta accagaaagc cacggctaac |
| 481 | tacgtgccag cagccgcggt aatacgtagg tggcaagcgt tgtccggatt tattgggcgt |
| 541 | aaagcgagcg caggcggttt cttaagtctg atgtgaaagc ccccggctca accggggagg |
| 601 | gtcattggaa actgggagac ttgagtgcag aagaggagag tggaattcca tgtgtagcgg |
| 661 | tgaaatgcgt agatatatgg aggaacacca gtggcgaagg cggctctctg gtctgtaact |
| 721 | gacgctgagg ctcgaaagcg tggggagcga acaggattag ataccctggt agtccacgcc |
| 781 | gtaaacgatg agtgctaagt gttggagggt ttccgccctt cagtgctgca gcaaacgcat |
| 841 | taagcactcc gcctggggag tacgaccgca aggttgaaac tcaaaggaat tgacgggggc |
| 901 | ccgcacaagc ggtggagcat gtggtttaat tcgaagcaac gcgaagaacc ttaccaggtc |
| 961 | ttgacatcct ttgaccactc tagagataga gcttcccctt cgggggcaaa gtgacaggtg |
| 1021 | gtgcatggtt gtcgtcagct cgtgtcgtga gatgttgggt taagtcccgc aacgagcgca |
| 1081 | acccttattg ttagttgcca tcatttagtt gggcactcta gcgagactgc cggtgacaaa |
| 1141 | ccggaggaag gtggggatga cgtcaaatca tcatgcccct tatgacctgg gctacacacg |
| 1201 | tgctacaatg ggaagtacaa cgagttgcga agtcgcgagg ctaagctaat ctcttaaagc |
| 1261 | ttctctcagt tcggattgta ggctgcaact cgcctacatg aagccggaat cgctagtaat |
| 1321 | cgcggatcag cacgccgcgg tgaatacgtt cccgggcctt gtacacaccg cccgtcacac |
| 1381 | cacgagagtt tgtaacaccc gaagtcggtg aggtaacctt tttggagcca gccgcctaag |
| 1441 | gtgggataga tgattggggt gaagtcgtaa caaggtagcc gtatcggaag gtgcggctgg |
| 1501 | atcacc |

SEQ ID NO: 2 (consensus 16S rRNA sequence for Enterococcus gallinarum strain MRX518)
TGCTATACATGCAGTCGAACGCTTTTTCTTTCACCGGAGCTTGCTCCACCGAAAGAAAAAGAGTGGCGAACGGGTGA
GTAACACGTGGGTAACCTGCCCATCAGAAGGGGATAACACTTGGAAACAGGTGCTAATACCGTATAACACTATTTTC
CGCATGGAAGAAAGTTGAAAGGCGCTTTTGCGTCACTGATGGATGGACCCGCGGTGCATTAGCTAGTTGGTGAGGTA
ACGGCTCACCAAGGCCACGATGCATAGCCGACCTGAGAGGGTGATCGGCCACACTGGGACTGAGACACGGCCCAGAC
TCCTACGGGAGGCAGCAGTAGGGAATCTTCGGCAATGGACGAAAGTCTGACCGAGCAACGCCGCGTGAGTGAAGAAG
GTTTTCGGATCGTAAAACTCTGTTGTTAGAGAAGAACAAGGATGAGAGTAGAACGTTCATCCCTTGACGGTATCTAA
CCAGAAAGCCACGGCTAACTACGTGCCAGCAGCCGCGGTAATACGTAGGTGGCAAGCGTTGTCCGGATTTATTGGGC
GTAAAGCGAGCGCAGGCGGTTTCTTAAGTCTGATGTGAAAGCCCCCGGCTCAACCGGGGAGGGTCATTGGAAACTGG
GAGACTTGAGTGCAGAAGAGGAGAGTGGAATTCCATGTGTAGCGGTGAAATGCGTAGATATATGGAGGAACACCAGT
GGCGAAGGCGGCTCTCTGGTCTGTAACTGACGCTGAGGCTCGAAAGCGTGGGGAGCGAACAGGATTAGATACCCTGG
TAGTCCACGCCGTAAACGATGAGTGCTAAGTGTTGGAGGGTTTCCGCCCTTCAGTGCTGCAGCAAACGCATTAAGCA
CTCCGCCTGGGGAGTACGACCGCAAGGTTGAAACTCAAAGGAATTGACGGGGGCCCGCACAAGCGGTGGAGCATGTG
GTTTAATTCGAAGCAACGCGAAGAACCTTACCAGGTCTTGACATCCTTTGACCACTCTAGAGATAGAGCTTCCCCTT
CGGGGGCAAAGTGACAGGTGGTGCATGGTTGTCGTCAGCTCGTGTCGTGAGATGTTGGGTTAAGTCCCGCAACGAGC
GCAACCCTTATTGTTAGTTGCCATCATTTAGTTGGGCACTCTAGCGAGACTGCCGGTGACAAACCGGAGGAAGGTGG
GGATGACGTCAAATCATCATGCCCCTTATGACCTGGGCTACACACGTGCTACAATGGGAAGTACAACGAGTTGCGAA
GTCGCGAGGCTAAGCTAATCTCTTAAAGCTTCTCTCAGTTCGGATTGTAGGCTGCAACTCGCCTACATGAAGCCGGA
ATCGCTAGTAATCGCGGATCAGCACGCCGCGGTGAATACGTTCCCGGGCCTTGTACACACCGCCCGTCACACCACGA
GAGTTTGTAACACCCGAAGTCGGTGAGGTAACCTTTTTGGAGCCAGCCGCCTAAGGTG
SEQ ID NO: 3 (strain MRX518 chromosome sequence) - see electronic sequence listing.
SEQ ID NO: 4 (strain MRX518 plasmid sequence) - see electronic sequence listing.
SEQ ID NO: 5 (consensus 16S rRNA sequence for Enterococcus gallinarum strain MRx0554)
TTCACCGCGGCGTGCTGATCCGCGATTACTAGCGATTCCGGCTTCATGTAGGCGAGTTGCAGCCTACA
ATCCGAACTGAGAGAAGCTTTAAGAGATTAGCTTAGCCTCGCGACTTCGCAACTCGTTGTACTTCCCAT
TGTAGCACGTGTGTAGCCCAGGTCATAAGGGGCATGATGATTTGACGTCATCCCCACCTTCCTCCGGTT
TGTCACCGGCAGTCTCGCTAGAGTGCCCAACTAAATGATGGCAACTAACAATAAGGGTTGCGCTCGTT
GCGGGACTTAACCCAACATCTCACGACACGAGCTGACGACAACCATGCACCACCTGTCACTTTGCCCC
CGAAGGGGAAGCTCTATCTCTAGAGTGGTCAAAGGATGTCAAGACCTGGTAAGGTTCTTCGCGTTGCT
TCGAATTAAACCACATGCTCCACCGCTTGTGCGGGCCCCCGTCAATTCCTTTGAGTTTCAACCTTGCGG
TCGTACTCCCCAGGCGGAGTGCTTAATGCGTTTGCTGCAGCACTGAAGGGCGGAAACCCTCCAACACT
TAGCACTCATCGTTTACGGCGTGGACTACCAGGGTATCTAATCCTGTTCGCTCCCCACGCTTTCGAGCC
TCAGCGTCAGTTACAGACCAGAGAGCCGCCTTCGCCACTGGTGTTCCTCCATATATCTACGCATTTCAC
CGCTACACATGGAATTCCACTCTCCTCTTCTGCACTCAAGTCTCCCAGTTTCCAATGACCCTCCCCGGT
TGAGCCGGGGGCTTTCACATCAGACTTAAGAAACCGCCTGCGCTCGCTTTACGCCCAATAAATCCGGA
CAACGCTTGCCACCTACGTATTACCGCGGCTGCTGGCACGTAGTTAGCCGTGGCTTTCTGGTTAGATAC
CGTCAAGGGATGAACGTTCTACTCTCATCCTTGTTCTTCTCTAACAACAGAGTTTTACGATCCGAAAAC
CTTCTTCACTCACGCGGCGTTGCTCGGTCAGACTTTCGTCCATTGCCGAAGATTCCCTACTGCTGCCTC
CCGTAGGAGTCTGGGCCGTGTCTCAGTCCCAGTGTGGCCGATCACCCTCTCAGGTCGGCTATGCATCGT
GGCCTTGGTGAGCCGTTACCTCACCAACTAGCTAATGCACCGCGGGTCCATCCATCAGTGACGCAAAA
GCGCCTTTCAACTTTCTTCCATGCGGAAAATAGTGTTATACGGTATTAGCACCTGTTTCCAAGTGTTAT
CCCCTTCTGATGGGCAGGTTACCCACGTGTTACTCACCCGTTCGCCACTCTTTT

### REFERENCES

[0215] [1] Spor et al. (2011) Nat Rev Microbiol. 9(4):279-90.
[0216] [2] Eckburg et al. (2005) Science. 10; 308(5728):1635-8.
[0217] [3] Macpherson et al. (2001) Microbes Infect. 3(12):1021-35
[0218] [4] Macpherson et al. (2002) Cell Mol Life Sci. 59(12):2088-96.
[0219] [5] Mazmanian et al. (2005) Cell 15; 122(1):107-18.
[0220] [6] Frank et al. (2007) PNAS 104(34):13780-5.
[0221] [7] Scanlan et al. (2006) J Clin Microbiol. 44(11):3980-8.
[0222] [8] Kang et al. (2010) Inflamm Bowel Dis. 16(12):2034-42.
[0223] [9] Machiels et al. (2013) Gut. 63(8):1275-83.
[0224] [10] Sheflin et al (2014) Curr Oncol Rep. 16(10): 406.
[0225] [11] Lozupone (2012). Nature. 2012 Sep. 13; 489 (7415): 220-230
[0226] [12] DeSantis et al (2007)Microbial Ecology, 53, 3, 371-383.
[0227] [13] Vogt et al. (2017) Scientific Reports 7(1):13537 doi: 10.1038/s41598-017-13601-y
[0228] [14] Keshavarzian et al. (2015) Movement Disorders, 30, pp. 1351-1360 doi: 10.1002/mds.26307
[0229] [15] Kang et al. (2013) PLoS ONE 8(7) e68322 doi:10.1371/journal.pone.0068322
[0230] [16] Jangi et al. (2015) Nature Communications, 7, 12015 doi:10.1038/ncomms12015
[0231] [17] Chen et al. (2016) Sci. Rep. 6, 28484 doi:10.1038/srep28484
[0232] [18] Pozuelo et al. (2015) Scientific Reports. 5:12693. doi: 10.1038/srep12693
[0233] [19] Ott et al. (2004) Gut 53: 685-693 doi: 10.1136/gut.2003.025403
[0234] [20] Frank et al. (2007) Proc. Natl Acad. Sci. USA 104, 13780-13785 doi:
[0235] [21] Michail et al. (2012) Inflammatory Bowel Diseases 18(10) pp1799-1808. doi: 10.1002/ibd.22860
[0236] [22] Chen et al. (2016) Genome Med. 8:43 doi: 10.1186/s13073-016-0299-7
[0237] [23] Scher et al. (2015) Arthritis Rheumatol. 67, 128-139 doi: 10.1002/art.38892.
[0238] [24] Giongo et al. (2011) ISME J., 5 pp. 82-91 doi:10.1038/ismej.2010.92
[0239] [25] Claesson et al. (2012) Nature 488, 178-184. doi: 10.1038/nature11319
[0240] [26] Giloteaux et al. (2016) Microbiome, 4 (30) doi: 10.1186/s40168-016-0171-4
[0241] [27] Manero et al. (1999) Appl. Environ. Microbiol., 65, 10 4425-4430.
[0242] [28] Williams et al. (1990) Nucleic Acids Res. 18: 6531-6535.
[0243] [29] Collins et al. (1984) Int J Syst Evol Microbiol. 34: 220-223.
[0244] [30] Masco et al. (2003) Systematic and Applied Microbiology, 26:557-563.
[0245] [31] Current Protocols in Molecular Biology (F. M. Ausubel et al., eds., 1987) Supplement 30
[0246] [32] Smith & Waterman (1981) Adv. Appl. Math. 2: 482-489.
[0247] [33] Dayhoff et a/.(1978) Atlas of Protein Sequence and Structure, vol. 5, supp. 3
[0248] [34] Srůtková et al. (2011)J Microbiol. Methods, 87(1):10-6.
[0249] [35] Schenk et al (2011) Sic Signal, 4, 162
[0250] [36] Atarashi et al (2008) Nature, 455, 7214, 808-812
[0251] [37] Karmakar et al (2015) Nature Communications 7,10555
[0252] [38] Daillère et al (2016) Immunity. 18; 45(4):931-943
[0253] [39] WO2013/050792
[0254] [⁴⁰] McIlroy et al. (2018) Aliment Pharmacol Ther. 47:26-42.
[0255] [⁴¹1] Viaud et al. (2013) Science 342(6161): 971-976.
[0256] [⁴²1] Moustafa et al. (2018) Clinical and Translational Gastroenterology, 9, e132
[0257] [43] Cocco J (1987) Epidemiol Community Health.; 41(2): 89-93.
[0258] [44] Benito et al. (2017) Oncotarget.; 8(63):106693-106706
[0259] [45] Mitropoulou et al. (2013)J Nutr Metab. (2013) 716861.
[0260] [46] Kailasapathy et al. (2002) Curr Issues Intest Microbiol. 3(2):39-48.
[0261] [47] Handbook of Pharmaceutical Excipients, 2nd Edition, (1994), Edited by A Wade and P J Weller
[0262] [48] Remington's Pharmaceutical Sciences, Mack Publishing Co. (A. R. Gennaro edit. 1985)
[0263] [49] Miyamoto-Shinohara et al. (2008) J Gen. Appl. Microbiol., 54, 9-24.
[0264] [50] Cryopreservation and Freeze-Drying Protocols, ed. by Day and McLellan, Humana Press.
[0265] [51] Leslie et al. (1995) Appl. Environ. Microbiol. 61, 3592-3597.
[0266] [52] US 2016/0067188
[0267] [53] Handbook of Microbiological Media, Fourth Edition (2010) Ronald Atlas, CRC Press.
[0268] [54] Maintaining Cultures for Biotechnology and Industry (1996) Jennie C. Hunter-Cevera, Academic Press
[0269] [55] Strobel (2009) Methods Mol Biol. 581:247-61.
[0270] [56] Gennaro (2000) Remington: The Science and Practice of Pharmacy. 20th edition, ISBN: 0683306472.
[0271] [57] Molecular Biology Techniques: An Intensive Laboratory Course, (Ream et al., eds., 1998, Academic Press).
[0272] [58] Methods In Enzymology (S. Colowick and N. Kaplan, eds., Academic Press, Inc.)
[0273] [59] Handbook of Experimental Immunology, Vols. I-IV (D. M. Weir and C. C. Blackwell, eds, 1986, Blackwell Scientific Publications)
[0274] [60] Sambrook et al. (2001) Molecular Cloning: A Laboratory Manual, 3rd edition (Cold Spring Harbor Laboratory Press).
[0275] [61] Handbook of Surface and Colloidal Chemistry (Birdi, K. S. ed., CRC Press, 1997)
[0276] [62] Ausubel et al. (eds) (2002) Short protocols in molecular biology, 5th edition (Current Protocols).
[0277] [63] PCR (Introduction to Biotechniques Series), 2nd ed. (Newton & Graham eds., 1997, Springer Verlag)

The application's sequence listing, which the Patent Office published only in electronic form, follows.

SEQUENCE LISTING (6 sequences)

SEQ ID NO: 1 - DNA, 1506 bp, Enterococcus gallinarum
taatacatgcaagtcgaacgctttttctttcaccggagcttgctccaccgaaagaaaaagagtggcgaacgggtgagtaacacgtgggtaacctgcccatcagaaggggataacacttggaaacaggtgctaataccgtataacactattttccgcatggaagaaagttgaaaggcgcttttgcgtcactgatggatggacccgcggtgcattagctagttggtgaggtaacggctcaccaaggccacgatgcatagccgacctgagagggtgatcggccacactgggactgagacacggcccagactcctacgggaggcagcagtagggaatcttcggcaatggacgaaagtctgaccgagcaacgccgcgtgagtgaagaaggttttcggatcgtaaaactctgttgttagagaagaacaaggatgagagtagaacgttcatcccttgacggtatctaaccagaaagccacggctaactacgtgccagcagccgcggtaatacgtaggtggcaagcgttgtccggatttattgggcgtaaagcgagcgcaggcggtttcttaagtctgatgtgaaagcccccggctcaaccggggagggtcattggaaactgggagacttgagtgcagaagaggagagtggaattccatgtgtagcggtgaaatgcgtagatatatggaggaacaccagtggcgaaggcggctctctggtctgtaactgacgctgaggctcgaaagcgtggggagcgaacaggattagataccctggtagtccacgccgtaaacgatgagtgctaagtgttggagggtttccgcccttcagtgctgcagcaaacgcattaagcactccgcctggggagtacgaccgcaaggttgaaactcaaaggaattgacgggggcccgcacaagcggtggagcatgtggtttaattcgaagcaacgcgaagaaccttaccaggtcttgacatcctttgaccactctagagatagagcttccccttcgggggcaaagtgacaggtggtgcatggttgtcgtcagctcgtgtcgtgagatgttgggttaagtcccgcaacgagcgcaacccttattgttagttgccatcatttagttgggcactctagcgagactgccggtgacaaaccggaggaaggtggggatgacgtcaaatcatcatgccccttatgacctgggctacacacgtgctacaatgggaagtacaacgagttgcgaagtcgcgaggctaagctaatctcttaaagcttctctcagttcggattgtaggctgcaactcgcctacatgaagccggaatcgctagtaatcgcggatcagcacgccgcggtgaatacgttcccgggccttgtacacaccgcccgtcacaccacgagagtttgtaacacccgaagtcggtgaggtaacctttttggagccagccgcctaaggtgggatagatgattggggtgaagtcgtaacaaggtagccgtatcggaaggtgcggctggatcacc

SEQ ID NO: 2 - DNA, 1444 bp, Enterococcus gallinarum
  Enterococcus gallinarum strain MRX518
tgctatacatgcagtcgaacgctttttctttcaccggagcttgctccaccgaaagaaaaagagtggcgaacgggtgagtaacacgtgggtaacctgcccatcagaaggggataacacttggaaacaggtgctaataccgtataacactattttccgcatggaagaaagttgaaaggcgcttttgcgtcactgatggatggacccgcggtgcattagctagttggtgaggtaacggctcaccaaggccacgatgcatagccgacctgagagggtgatcggccacactgggactgagacacggcccagactcctacgggaggcagcagtagggaatcttcggcaatggacgaaagtctgaccgagcaacgccgcgtgagtgaagaaggttttcggatcgtaaaactctgttgttagagaagaacaaggatgagagtagaacgttcatcccttgacggtatctaaccagaaagccacggctaactacgtgccagcagccgcggtaatacgtaggtggcaagcgttgtccggatttattgggcgtaaagcgagcgcaggcggtttcttaagtctgatgtgaaagcccccggctcaaccggggagggtcattggaaactgggagacttgagtgcagaagaggagagtggaattccatgtgtagcggtgaaatgcgtagatatatggaggaacaccagtggcgaaggcggctctctggtctgtaactgacgctgaggctcgaaagcgtggggagcgaacaggattagataccctggtagtccacgccgtaaacgatgagtgctaagtgttggagggtttccgcccttcagtgctgcagcaaacgcattaagcactccgcctggggagtacgaccgcaaggttgaaactcaaaggaattgacgggggcccgcacaagcggtggagcatgtggtttaattcgaagcaacgcgaagaaccttaccaggtcttgacatcctttgaccactctagagatagagcttccccttcgggggcaaagtgacaggtggtgcatggttgtcgtcagctcgtgtcgtgagatgttgggttaagtcccgcaacgagcgcaacccttattgttagttgccatcatttagttgggcactctagcgagactgccggtgacaaaccggaggaaggtggggatgacgtcaaatcatcatgccccttatgacctgggctacacacgtgctacaatgggaagtacaacgagttgcgaagtcgcgaggctaagctaatctcttaaagcttctctcagttcggattgtaggctgcaactcgcctacatgaagccggaatcgctagtaatcgcggatcagcacgccgcggtgaatacgttcccgggccttgtacacaccgcccgtcacaccacgagagtttgtaacacccgaagtcggtgaggtaacctttttggagccagccgcctaaggtg

SEQ ID NO: 3 - DNA, 3127431 bp, Enterococcus gallinarum (residues 1-1,563,716 of 3,127,431)
  Enterococcus gallinarum strain MRX518
tttagctcaggcagctactgcagatcaaatctaccattggatcactgttttgaatgagacgcaaaacgaggtgcgatttaccaataatccgaccatttatttggaagtagcagttgttaaactagcaaatcagaggagattgccagcttcaggagaagtttcggtgtcgaatcaagaagttcagcagcttcgtcaagaaattcagaagctgcagtcagaagtacgaaaactacaagaaaacccatcggcggccagcagtgaaccggtcaatccacctgccaagaagaccagaaatagcagcactttccgagtgccgaaagaacgggtctttcaagtcttgaaagaagccacaaaaaaagatctcgcaaatgtgcggaacatttgggatgatctgttgatgtcattgtcggtgacacaacgagcaatgctccacgcgagcgaagcaaaagcagccagtgcatctggtgtagtgattgcctttgattatgagattgtctgtcaacgagcagccaatgaccaagacttgcagctgacattgcataatcaaatttcacgaatgatatctgattatgcaccgcaagccgtgtttatcacgaaagaaagctggccaatcttacgacaagaatttattgctggcggacaaaccttcaatacaggcgaattagatgaaggggaagctgaaccagaaccaactacggaagaacctgaaaatgaagtcgtcgttaccaaagcccaagagctttttggtgaattggcgagcatcgaagaaaattgagagaattggagtgaagaacaatgatgcgaggcatgggaaatatgcaaggcatgatgaagcaagtacaaaaaatgcaaaaagagatggtaaaagaacaagaagccctaaacagtaaagaatttatcggcgagtcaacaaatggctatgtgaaggcaacttttacaggtgataaaaaattacgcgatctttcgatcgatcaagcaatcgtcgatccggaagatgttgacatgttacaagatatgctgatcttggcagtaaatgatggattaactaaaattgaaaaagaaaccgaacggactatgggtaaatacactaaaggaatccccggtttataaaaggagaaatgtggcgtgcagtatccagaaccgatcgcacgattaatcgacagctacatgaagctgccaggtatcggacaaaaaacagcaactagattggctttttatacgatcgatatgaaagatgaagtcgtcaatgagtttgctaaatcactgttgagcgtcaaacgtgatctgcatttttgcagtatttgcggaaacattacagaaggagatccctgtgagatctgcagtgacccttcacgagataaaggcacgatcttagtagtagaagaaccaaaggatgtcatggcgttagaaaaagtccgtgagtaccatgggctctatcatgttttgcatggtgttctgtctccaatggaaggtactggaccagaagatatcaatattgctcctttgattcagcgtctgcatgatgaccaagtgaaagaagtgatcattgctacgaacgccacgacagaaggtgaagctaccgcgatctatctttcccgactgatcaaaccagcggggatcaaagtgacgcggttggctcacggtttatctgtcggcagcgatattgaatatgcggacgaagtgacattgcttaaagcagtggaaggaagacgtgaattataagaaattggaggcaacaagggtgagtggactgttcataaccattgaaggaccagatggcgctggcaaaaccagtgttttagaagaactatatcctcgtttgcagctagaagccaaacgagacattgttaaaacgagagaaccaggcggtgtaaaaatcgcagaaaaaattcggcggatcatactggatcccaaaaattctgagatggatgaacggactgaagcattgctgtatgctgctgcaagacgccaacatttgatccaagtgattttaccagcattgaatgaaggcaaaatcgtgatctgtgatcgatttgtagatagttctttagcttatcaaggggcagggcgccggatcggtattcctgagattgcacgtatcaatgaatttgccaccgaaggcacggagcctgacttcactttgtatttggatgtcgattcggatacaggtttaagaaggattcaagagcatcgggctcatcagttggatcgcttggacgcggaaggattagaatttcaccaacgagttcgtcatgcttatttgaagctggcagaagaaaatcctgtacgcatccataaggttgatgctagaatgggattacaagatgtcgttgagacaagtttttcagcaatcgttgaagcatatccttcctacttcaaaacaatgtgatcgctgacgacaataataaggagatgatctcatgaaattgattatggcaatcgtgcaagacaaagacagcaaccgattagcaaatgaattcattgatgccaacattcgcgctacgaaactttcatctaccggcggattcttaaaagccggcaacagtacatttattattggtcttgaggatgagcgggtccaagacgcattggaactgatcaagaaaacctgtcagtctagaaaacaatatgtttccacaccaatgtcgttagacatctcacttgatgggcaagtaccttatccagtggaagtagaagttggcggtgcaacggtttttgttctaccagtcgatggcttccatcaatactaaaaaggagcagaccatggaggaactttttttacaagaatatcaacctctggtttttgcccaactgaagaaaagtgtcgagcatgggcggattgcccatgcttatctttttgaaggcgatgcaggaacgggcaaacatgagatgagtttgtggctggcgaaacgtctcttttgtacgaatgttcaatcagatgaaccttgcggatcttgcagtaattgtttgcggatcgctcaaggggagcacccggacgtactcatggtggaaccagatggacagacgatcaaagtagatcaaattcgtcaattgcaagaagaattttctaagagcggcttcgaaagtcgcttgaaaatctttcttctttctcaatcagaaaaaatgaatacaagtgcagcaaatagtttactgaaatttttggaagaacctgtagggaatttcttagcgattttagaaacggaaagtgttggacggatcttgccgacgatccagtcccgttgtcaaatcattcatttttcaccattggcgaaagaaaaattgcagacaaagctgcaaaaagaaggactttctcaagagagtagccgtcttttgagttacttgacaaatagttatcataaagcagttgaaatctcccaagaggaatggtttaatgaaactaaggatgctgttgcacaatgggtgaagtatctcttgaagaaagatccgcaagcgtttattttcgttcaaaaaaagctgctcgctttagcaaaagaaaaagaacagcagagagttattttttcgattctgttattttattttcaggaagaacgagaccagttattggcacaaggcttatggggaaaagagatcaatcttgccatcgaagctgccttgcaagcccaaaagaaactgcaagcgaatgtagcttttcaaggcgttgctgaacaattttcagtgaagatcatctatgacataacagtaccctaaagggggagcaatgttatgatagaagtagtcggtgtacgctttcgcgctgcgggacaaatctatttttatgcgcctgagaagcgagattacacgtcgggggaacgagtgatcgttgaatcacaagaagcaaagtttatggcgaccgtcgcgattcctaagcagttgatcgattcgcaagatttgccttatgacataaagccaatcattagacaggccacgcctaaagatatcgagaaagaaaagaaaaatcgtcaagatgctgaagaagcgctgatcattggcaagcagaagattcgagcgcacaatttacctatgaaacttgttagggcagaatatacatttgagcggtcaaagatgctgtattattttacagcggatggtcgagttgatttccgcgaactagtcaaagatttggcgagtcattttcatacaaggatcgagttgcgacaaatcggtatacgagatgaagcaaaggcgatcggcggaattggtccatgcggccgcaagctctgctgttcgacgttcttaggcgattttatccctgtctcgatcaaaatggccaaagatcaagggctgtctttgaatccgacgaaaatttccgggttgtgtggtcgtttgatgtgctgtttgaagtatgagaatgatgaatatgaacaagcaaaacgagaattaccggatcgcggcaaagaagttgagactccggatggaaaaggaaaagtagtcggtctggatttattgcagcgcattatcaaagtccgtttgtacgatcgacaaacgcccatagactatgaatatgaagaactagtgacaaaataagtaggtgaccataatgagcatggacaagcgatcgatttatgatggattgaatcagttagaaaatgaactgcaaaattcgttgaataacttagcagagatgaaacagtctttgcaagaaatcgttgaaaaaaatacgacgctagaattagaaaatcaacgtttacgggaacatatccgtgaattgaatcaagtggccgaagcgcccgcagaatcggtcaaacaagaattgtccaaatcgcgaatgaatttggaaaagatatacgaagaaggattccatgtttgttatgacttatatggatctagaagagaacatgatgaaccgtgtgctttttgtcttgaagtgatctatcgagaaagcggacgataataggaaatgaccagcgcaggtggctggtctttttttgaaagtagggaaagtatgcagaaacaacaaagctataaacaatcgaatggaacgctttatttagtgccgacaccaatcggaaatttggaagacatgaccgttcgttgtgtcaaaattttaggggaatccgatttgattgccagcgaagatactaggaatacccagaaattattgaaccattttgaaataacgacaccgcaacgaagtttgcatgaacacaatttcaaggaacgtgtgccgcaactcatcgatcaattgctagctggaaaaataattgcacaatgtagtgacgcagggatgccatcgatcagtgatcctggtcatgaattagtcaaagcgtgcattgcagctgatattccagtgattgccttgcctggtcctacagcaggattgactgctttgatcgcttctggtttgtctccgcagcccaatcttttttatggcttcttacctcgaaaaaagaaggagcaaaaagaagcattggctgagctggcgaaccagccggctacgatgatcttttatgaatcaccttaccgcttggcagcgacgatcgaaaatatgattactgtttttggtgcagaacgttctgcagtcatctgtcgagagttgtcaaaaatccacgaggaatacttgcgaggttctttaaaggaactgttggactatctaggggaaaatacagtcaaaggagagtgctgccttttggttgagggatcgacggactctgtcgaaatcgtttatgatggaagccttaaagagcaagtaacagctctgatggagaccgggatgtcttctaaggaggctatcaaggaagtggcgaaacgcaatcaagtaaaaaaacaaacggtctatcatgcctatcacttagacgcttaaccgatgcctgtgcatcggtttttttgaataatgagtttcatttttagtggcatggatgattgggtgaaaccgtcacaaaaggacatgatatactagtttaaaaaggagaaaaagatgaacatacgagacatgcaaaaagcgatctatcaaaacaaaattgatcatcaatttaatgtcaccaatattgaaaaggaatttttgtcattatatggtgaagtggctgaagcttttgatgcttatcgcaaaaaacaaaatgtgggggaagaattggcagatgtagccatctaccttctcggtttagcggagatcttatcgattgatctagacggagagattcagaaaaaaatgaaaatcaaccaagcccaccgctataccagttatggcaatgggtatgcaaaacgaatcgatgaatgatggttcgtcattcgattgaactgacaatgaattgttaaaggaagtgggaaacgaaatgacaaccaacttaagcatacgtgagctaacagaaaaagatttaaaggaagctgttgaaatgtatattgcagtcttttcagcggagccatggaatgatcaactgaccgttcctcaaattacagaatatgtgtcatccatgatggcgatgaatacttatattggctattttctaacggactcattgaccaatgaaaagatagggtactcgttaggctttattaagccgtggtaccaaggaaaagaatatgtcatcgatacctttttaattgctggcaagcatcaagggaaaggtttcggctctgcttttttagaaaggatcaaagaagagttggtcaaaaaaggcattcccacgatactattagatacagaagaaaagatgccagctgccgatttttataaaaagaatggctttaagcctttgacggataatgtgactttttatgcgtcgttttgatcgccattacccaagaaagccatcagtcgaattgcgaatgttagatttcataacatataaagtgagcttttttcagaataattgcaaaaatttaaaaaaacactagcgatctcctggataagatggtaggatatctaacataaaagggagtgattggaatgggaacaggaaatagtgggtttattttggtttgcagtgggatggtttttttaatgactcctgcgctagcttttttttatggtggattggaaaggcgaaaaaatatcttgaatacaatgatgatggtgatttgcaccatgggactagcttcagttctgtgggtggcggctgggtattcgctttctttcagtggtaccggtgcgtttatcggcaacatcgataagttatttttccagcaagtttccatgacggacggagaagggattcctgaaggattgtttgcggcttttcaaatgatgtttgcactaatcacaacagcgatcattaccggatcagtcgtaggacgaatgcgtttttcagctattttcttatttattggctgctggctgtttttggtttactttccgatggcccatatggtttggggtggcggcttcttagatgctatcggttcgattgattttgcaggaggcaacgttgtccatattagttcaggaatcagcggtctcgtgctagcattagtcgtgggtaagagacgcgagtttcatcaaacggagtatcgtccccataatattccatttgtcgtactaggtgcagggttgctatggtttggctggtttggcttcaatgctggatcagcattagctgctgacgggatcgccattcaagcgttgttaacgaccaatacggcagccgcagctgcgatgctctcctggatgttgattgaaaaagttctattagggaagccaaccattgtcggagcttgtaccggagctgtcgtgggtctggtagcaattactcctggcgcaggttttgtttccctttggtcatcctttgtgatcggggcattagtgagtccgttttgttattactttatttcggtcatcaagcatcgcttaggtctggatgacgctttggatgcttttggttgtcatgggattggcggaatctttggtggaatcatgacggggattttcgctgatcctgctgtcaatcatcaaactgggttgctctatggtggaacagaattgttcattgcgcagatcattagtatcgtatttacgattctttttgcggggggcatatcttttctattgatccatgtgatcaaacgcgtgctaccgatccgggtcacagaacaagaagaagctattggaatggatcgcagtgaacatgatgaaacagcttatccaacgttcatggggctggattcatagatggaggaatgcagatgaaaaaagtagaagcgatcattcgacaagaaaaattagaagaattaaaggcagctcttgatcaaatagatatggctggaatgacggtgagtcaagtattgggctgtggtaatcaaaaaggggtcaaagaatttgttcggggacaagcagtgattacgacacttttgcctaaagtaaaggcgagttttgttgtagaagatgaagaggttgaagcaatcattgaactgattttgtctatctgccatacaggtgaagtaggtgatggtaaaatttttatttacccaatcgaagaagcagtacgaatccgaaccaatgaacgaggcccatcggcgctgtaagtctagacgtttttaacgaatcgaaccaaatttgaagtcttaaatcataacgggaagcaaaaagaatttctgtcttttttacagggattctttttgtttgcaacaatcgccgatgcttagaatgagcctcttgatagggaacttctgttcgtttataatagaggagaatggagtggtgaagatggctgagttgcgttttccgttaaaaaacgatacgtctcggaaaatcatccatatcgatatggatgccttttttgcatcagtagaagaaagagacaatcctgaattggctaagcatcccttagtgattgcccgccacccaagtgatactgggggtagaggtgtcgtcacgactgccaattataaagcacgtcagtatgggatccattctgcaatgagtgcgcaaaaagcctttgaattgtgtcctcatgccgtctttatacctggcaaccatcagaaataccgcgaaatttctcagcaagtccgagagatctttgggcgctataccgatgtgattgaaccggtttctatcgatgaggcttatctggatgtgaccgtcaacaagatcaactgtccttcagcgatcaaaattgctcgcatgatccagcaagacatttggcagacgacccagcttacttgttcagcaggcgtcagctacaataagtttttagccaaattatcttcggattttcacaaaccccgggggttgacggtagtgatgccggaagatgccgtggtctttttaaaaaaattaccgattgacaaatttcatggtatcggtaagaagacagtgccgagaatgcacgaattagggatttataaaggatctgacctttatgaatggagcgaaatggcattgatccaagaatttggaaaaatgggctactcgttataccggaaagttcgaggaatccatgattctccggtcagtgtgacgagagaacgcaaatcagtcggaaaagaacatacgtatggcaatgcgttaaccacagaagatcaagtcatcagtcagctaagaaacctggcagaagaagtagaaagatcattgaaacgtacgcaaaaacacggaaagactgtggtgttgaaagtgcgttatgccgattactccaccatcacaaaacgggtcacgttgccagagtatatgcacaagaaagaagctattttttcacaagctagtttgatttgggaggagattctaggaatcgaaaaagggatccgcttattggggatcacagttacgaatcttgatccattagcttatgaaaatatcgtattgcctttgtgggaaacagaataaaatatatggaggcgcataatgacgacaaacagtcaatggaaagcgttactagaggaattcatggcacaagaaaatccagcacgaaaagttcaaatgcgggcgtacatgcggaaccaatttgactttttagggattccgtcacctgtacgcaaacaaatacaaagaccttattttgctgcaatgaaaaaggccgccatcgattgggcatttgttgaaacctgttggcaactaccttatcgtgaaatgcaatatgtagctatcgactatctggtaacgatgcagtcggtcctccaaccagacgaactggagaaaataagtgaattagtccttcaaaagtcttggtgggatactgttgatggcttgaataaagttgttggtgggctgactatgacctacccggagttgagccaaaagatgcttgcttggagcaaagcagaaaatttatggctccggcgcatcgccattgaccaccaactgcttagaaaagaaaaaaccgatcgcgagcttttagagacgatccttttaaataatttaggtagcgatgaattctttatcaataaagcgattggctggagtttgcgcgattatgctaaaacaaaccctgagtgggtgcaggcttttctgttaacgcacaaagatcagttagctccgttaagtatgaaagaagcaagcaaacatttgtaatgatggtgtgttttatgatcaaaataaaagggaatgtgccataaatctcctacaagtaacactatccgaacattaattattattgctcctgcggtgcagggactcctcgtcgcaaaagtcagaggaatctatcctagcaacagactattattcggtttaacttgttggatgatgacttatgtcacagtcccttttatcttttgtatcagtttgaaaactgaagtttattcaagtcgtcaaatactctttttgatttgttcatagcttttttctgcgtctttgcatttgtcccaaatcaccgcttcgcctagtgctagggatttaggaacatcaatgattcgttgattgctgctaccgcgaaattgcagattcaaattgcgtttgctcaattcgaaacggccatcaactaggatatcgatgcgagacagcaactcaagcttatcttctgtttccaacagtagttcctcgaaggtgtaaccagaccagctccaaatatctttgccatgaccgaactcggaacggactctgtttaccacttgcagacatacttcagtattcaaaaaaggttcgccgcccaatagtgttagtccctgaacataatcgtgccgcaaatcttcaatgatctgttcttcgagttctgctgtgaatggggtgccatagcggaaattttggactgctttattgaaacagccttcgcaagcaaataaacaaccactgacatacaggctattgcggataccttcgccgtcaacaaagttgaaggctttataatctgcaatatgattttgactatactcttttgcttgccattctttggggcgaggatttctcatgtgcaaaacttctttctaactattcgattattcgataaaaatgtccttcgcgactgtagcaaaaaccattagaaagcacaaatgcgcgagcaattccagcactcgttttctgcggactcctgaccaacagttgtcagttagaaagaagcagaatttgcttacgctttagtcgcgtaggggacacttgtttcagtcattatgtttcatatgtttgacacgagcggaaatttctttgtgacgaccgtgaaccattggtcgagcttgaggatttcctaggtaaccgcatgttcgtttgacgacgtcacaactctttggatcgtgattgccacattgtggacattcgaagccgcgttcagttggattgaaatcaccttcatatccgcattcataacaatgatcgatcggagtgttggttcctagataagcgacacgatcatacgcataattccaaactgcttcaagagctttgggattttgttgcagaactgggtattcacaataatgaataaagccgccagaacaatactttggatagtctttttcaaaatccaacttttcaaatggcgttggatttttgcggacatcatagtggaagctatttgtgtaatattctttatctgtgatgtcttcaacgatgccgaatttttctgtatctaaacgacaaaagcgatcggtcaagctttcgcttggtgtggaatagacgctaaaatgatagccgtattcatcgccccaagcatctgcatgggcttttaactctttcacgatggctaacgtgaattcttttgcttcaggatcattttcccactcaccaccaaagaaagcagcagctgcttcatacaatccaatataccctaaggaaacagtagcacgtttatttttgaacaactcgttgacactgtctttgcgatcgaggcgtttgccgaatgcgccatacatgtataggattggtgcatttgccggactcgcttctttgcaacgttctactcggtaaacaagcgcatctttgacgatttgcagacgctgctccagaagagaccagaatttgtcgcgatctccgttagcttctagggcaatgcggggaatattcaatgttacgactccaaggttcatccgtcctacattgacttcttcgccatgttcatctttccagccttgcaagaaagaacggcagcccatcggtactttgaaactacccgtcaattcaatcaacttgtcataattcaagacatctggatacatccgtttcgttgcacattccagagccaattctttgatgtcgtagtttggatctgtgggttccagatttacgccgcgtttgatactgaaaatcaacttcggaaagattgctgtccgtttttcgctgccaagtccgttgatccggatctgtaagattgcacgttggatttctcgctcaaaccagtttgttcccagaccaaagcctaaggaagtgaaaggtgtctgtccatttgaagtaaacaaagtattgatctcatattccaaactttgcatcgcatcgtaaatgtctttttttgtcttgttcttcgcgtaagcttcttggcgatcctcgccgtcgatccattcacgcgcatcttgcaagtgtttttgatagttcaattcagcaaaaggtgcaagtaattcatccgtccggtctgcagaacaaccgccatattgactagatgccacattggcaatgatttgagagatctgagctgtcgccgtttgaatcgattttggtgattcgacttctgcgtttccgattttgaaaccattgttcagcatgcctttgaaatcgattagacagcagttagtcatcggagtataaggatgataatctaaatcatgataatggatatcacctttttgatgggcgttcgccacatgagggggcagcattttcaagccgatggatttccctacgatccctgcagtcaagtctctttgagtattgaagacattgctgtctttattggcattttcgttgaccactgcttgatctttattcattaatttattgatcgtaaagttgatatccgtcgctttgctgcgttcaaaatcgcgacgtgtccgatagttgatatactcttcggccaatgcatattcattttttgctaataaaatatgctcaacgatgttttggatttcataaattttaacgtttttggtaaaccgttcggcgatctcatgatcgattccttctacgatttctaaaatccgttcatgatcgaggggagatagttctcctttaacttttctttgggcttttactaatgcatcgtaaattttttggtcatcgaaatctactaagcgaccatcacgtttcacgatctttaattgggttaattgaggatggctacccccgctttgttcagtatttctctttaagtccatcattactatcactccttatcttctccaatatcataaaacaaaatatggttttcggcaactatatatagtggcttttattcgctaaataattcagtatgcacaatatgtagtgtatattcaaaagcggttttcaataaaaacttgatgataacaaggacttgcatgtttcacgtttcacaaaatgaataaaaattgtaaaaaatttttatgtgtaaaaacgaagcaggggcgatagagaagaaaatatgctaccataaagaaaatatgaagaaaagtagaaatagatcaaggagaatttgcatgaaaaaaatgatcgatgtgaagcacctgacaaaaacctatggaacccgcttcaatcaaaccaaagtcctggacaatctttctttttccgttgatcaaggggaatttgtggggatcatgggaccaagtggtgccggaaagacgacactgatgaatatcctctcctccatcttacgtccgagtctaggttctgttgcaatcggaggacaagaaatcacccgcttgtcagaaaatgagctaagcgattttcgccgaaaagaaatcggctttatttttcaagattttaatttactagacacgttgactgccaaagacaacattatcttaccactggcgatcgaccgtctttcggtcaatgaagttgaccggcgattggcacatctggcgaacttattgggaatcgctcatttgttagaccgctacccagaagaactgtcggtcggtcaaaagcaacgggtggccgccgccagagcaatcatcagccgtccttccgtgttgtttgcagatgaacccacgggatccttagactcaaaagcggcgacagagctgttgcgttatttagctgaaatcaatctgcaagaagatatgacgattctcatggtgacccacgatcctttcactgcaagttattgcaatcggattttgtttattagagatggtgtcttttttgcagaggtagtcaaaaaagggtcccgcaaagaatttttcgaaaaaatcatcgatatgcaagcgacgattggaggcggggatcgccatgctctataaaattggctggcgcagttttttgcagcagtttcgcaattatgtcgtttactttgtgtgcatgatgacggcagtcatgattttttattcatttagtgctatgatgaatgaccgtttgctgactcaacgagtgcagcaagacattcgcatcgatggcgtattaggttttggtagtacgatcgttgctgttgtggtgcttttttttatgctaagtgccaatcatttcttcttgaatcaacggcaaaaagagatcagtgtttatcagctcctgggtttgcgcagagcaaggttaagctggctactgctgagagaaacgttcctcctaaatcttttttcccttgttgtgggcattttcatggggattatattctcgaaatttttctcaatgatcttgattcgagtgatgggactatccatcactagtcatttttttaattcgcctcgttcgattttgactaccgtgttggtattttcgcttgccatggtagttttgagtggtcaagtggttttgtttgtctggcagaatcctttgatcgatctaatgaagaacaactatacactgccagtgagcaaaatgaagtgtcgcccatttcggatggcaatggggatcatcggtttgcttctgttagggatcggctattacttagctctgacgctacgaacgacactggagcgctatattaattatacagaagattatactgctgttttatggattccattgctgattttattttgctgtatcacagcgacgtatttgttctttgactgcacattgccaatgttgttgcatgtcttaacgctcccccgcaaaaaaatcagcaaaggcacacgcttgattgcattcaacaatatccgggcttatttgcagcggacatggaaaagtttttcattactgacgatcattactgcgatcgcgatttctttgattggtggcacgatgggggtgatttccttgaattatcaggcgaccaatcgtgattatcccgtcgattttcaagtcgcagcagaaaatgcggaagagttaaagcaagtgattctggaaaatcagagtcaggtcgtcgcggagcagacgctcacttttcgtatcgtgccgttaaacatcaacgcgaaatacttggccaatccgataaatacaggacaagaaaccgtattggtcaatgcgctttctttatccgattaccgagcatttcgtcgattggtgccggatgcacctgcggtttctttaggagaaaatactgctgttttgtttgatgatgattatgatattgcatacaacttgagaacttaccaaaaaaatattgcgctggaaaatggtaaaaaactcctcttagacaacacgtatcaagattattttggtgatattgcgttgcgttacaccttacccaatgtattagtcgtcaatgacaaggattttcaggacatgtcgggatttgactatcgattgacttatttcaatgttcaaacggagaatcaagagcaattaactcggacgttagatgatcgactttcagtcgaatggacctatccgttttattacaagcgaacacaggacaaaggccaagtcaagtatcagctgcaaacggagatctcagagaagcaacaatcatcgaaggagtttattactggttatcgcttgaacttcgccaatcgctatccgaatatgcgggccattagacggcaaggcggtattattttgttcgtttctttatttgtcggggtgatcgttttgatcactacgtctagcagtttgattgtacggcaattttctaatacagagcgggaaaaaagaaattatcgtttattgcgtacactcggttatagcaaaaaagaaattcgttcgatcgtctactggcagaatttttgggttttcatgccaggtacattactcgcgattttacatgccgcattcgcaatcaacacgctgacgcaaatcatcgtgagtccagggtattgggtggcacatctgtttgcaggtgttgcagccgtcgtattctttattgcttatttgattacagttaagttatgcttacggatcattgaagagtaagctgtcagatttttttcaattttgagctggtacaagacacgaggaatggtataatttaagggataaatgagtagaggagtagataggatggataaaaaagaagagcaattactgattgatctgacaactgcccgtggtgttccggggaatgaagaagaagtacgggaagtcttcaaagcatatgcgaaagactttgccgaagatatcttttacgatgggttaggaagcgtgattgccaaacatgtaggggatggcggcggacctaaagtttttatttccggacatatggatgaagttggctttatggtgacaaagatcaccgataaaggtttcatcgagtttcaaacattaggcggctggtggggccaagtgatgctggcacaagaagtagaaatcaaaacgcaagctggcaaattggttcatggtgtaatcggttctaaaccacctcatgtgttgacgccggaagttcgcaacaagccttatgatatcaaagacatgttcattgatatcggtgcttctagtgaggaagaagcaaaagattggggcgtacgtcctggagatatgattacgccgtatatccaatacaaacggatgaatgacagtaagtttttgctagctaaagcgtgggataatcgtattggaacagcagtttctttgcgtgtgttggaaacgttggctgctgaagggcatccaaattgcttgtttgctggcagtgatgtcatggaagaagtaggattgcgtggcgcacgaacaagtacgcacctagtgaatccagacatcgcgattgctcttgatacggggacagctggtgatacgccaggaatgactccaaaagaagcagattctgtcttgggcaaggggccgcaagttttgatttttgatgcatcgatgatccctcataagaaactcttgaattttgtgatcaatgttgcggaagaattagagattcctttccaatatacggtgatcaccggtgggggaacagatgccggtcaaatgcatctgacccgtgatggtgtaccatcgatcgcgattacagttccagtgcgctacttgcattcccatacttctgtcattcatgaagatgactacttaaatacagtaaaattagtaacagaagttgttcgtcgcttagatgacaaaaccgtgaaagaattacgaagctattagaaggagtagaggatgagaaaaaatagtgagatccgctccatggcatcacgtgcattaaagggcatgtgggggcggtatattttagcctttattgctacgatagccattcaaagcatggttagcagtttggtgctgtcattgacaaaccatacctttcaacagacacgagaaacaatcattgattatattttggaatactttgtttttttcgcattgacgataagtttaaatatcatggcactgttcttgattcgtcagcgggagatccatgtgtcggatatttttcttgtttatgacaagcgttattacgtaccttttctattgctgaatttggtgaatgctctcgtaaattatctgattagttttgtgacgtttttaccccatttagttgttggcggaatgaatcagtaccttgatttagtcttgaatgtcaacagtcggatcactgtagactggagtctcttccgttcgtcgatttccttcatcatcagttttcttatttctgtggtccttttcttatttgtctcccagatcataagcggattatttcagtttgcgatctatgtacgatacgaccatccagaaatgacgacgctacaagcgataaaaggagcttggcatttaatgaagaatcatatcggtcagtatattttgctgcagatttctttattaggatggatggttttaggtttgtttgcttttgttatcggtctattttgggcgctggcctacgcaaacactgcgaatgccgccttttatcaagcgttgatcgaaaaagaaaatgatcgcgttcttagctaaagaacacctcttgtaaagatatgatccacggttgtgacgttgggtgactcaatgcagcaatgagagagaaaatcatcgatttcttttggctctttgtcaataaggactgatgggttgtacaaaatcaaatctgggtcagaatgaacctcattctggctcagattttttgttatcttactttgattaattgattgatcaaaaagattctaattctcatgttctcaaatgatttaaatccgtaggatactcgtttcattgtctttatatgggtattcttcgcttctatttttccattggtgtaaggatagatcatcgcgttggtgatgccttcttcataggtcaaaaggttttggagcttttcccgaaagccgtcatctaacgtttcgggaagttctgccaataaggagaaaaataagtcagggtctttgtctcgaaaggcttcaactaattcatgaaaatagggatacgcctccttcagggacgtagaaaagccaagcaatcgatcaatcatcatcgcttccgtaagaaatgggtattttggtgctcgaaaacttttccatgttttgtattcataatggttgatgtttgcacgattttttagcaaaaagcgccagttctttttcagtttttctgcctgacttttctgtcctactttacgaagttcattcatttcacggatacgcaactcattaaaggcttgattcatgtgtttgataatatgaaaccgatcaatcactactttcgcatttggcagaatacgtttggtaagctggaagtaggcggcgttcatgtctgtgactaaaaattttacttcttcaggattagtgcagcctaagaaatagcttgttaatcgaggcaatttacgcgtaggcaagacatcaattaattgtcctgtttcgccatctgcgcaaataaagctcattttatcttctatggaagcgtgcgaacgaaattcatcaaccatcaatactctgggggagaatcctcttagattgctttggtaagtagcttttaaactctttcaacgtacgaataacggtggtcaaagatacctgacaatttttcgcaataaaagataaagatactttttcagtcagtaaagaagcaattttatatctgacatgattcgcgattgaatgtctgggttgaacaaaataactttgagccgtccaatgggttcgacagtttttacaggtatagcgctgcttttttaagcgcataaccaaaggcatgtgattgtattgttcaaagcggacaatcgtttccttcttcccatttttcactacaattactttcccgtttccatctaccacagtagaaccacaatttctacaggtatggggagcaggtgtgaaaacagcatcgacgatcaacgtctttttcttctgaaaggtctcgtaagagacctctgtaatcatcaaatctttctctattaatcgcagcatttttttgatagaatcattcatatagcatatcgtcctctcagttgtttattttgtcgtgatttaatcatactagagaacgatatgttttttaatacctaaaataaaaatggggctgaagaatcaattctgattcatcagtcccataaattatagagcctttcttttgctaatgagctccagctgtcgcagccgtttttgctgtttatttttgagtaatccaatgcttttgtgatagcatagggataaggaggcggaagtatgaaactaacagttttaggatgtttaggcgcatatccctataagggtgagggaactactggctatttattagagtctgagggatatcatttgttgctggatgctggcagcacgacactgattcaattggaaaaaatcttggatccgttagcattggatgctgtgattttgagtcattaccatcacgatcatatcgcagatctgggtgtcttacagtattattggcagctatttcctaagcaagcagagcggaacgtattgcccatttatgggcatggagaagacagtattcatttcaatgagttgaccatggcgggagttacagaagggcatgattatttacaaacaaaacagttggaattgggaccgttttctgttacatttatgaagacgattcatcctgtaacttgttatgccatgcgctttgtggagaatagtacaggtaaaatatttgtattcacaggcgattccggctacttagaaagttttgtcgattttgccaaagatgccgacttatttttagcagatacctacctctttgcagggaatgagcgccacaaagctcattttacttctcaagagtctggagaaattgctgccgcagcgaaggtcaaaaaactggttttgactcatctcccacagcatggtgatctggagcaactgaaagaagaggcagcagcggcggccaacgggataccggttgaattggcagcagttcaaaaaatctttgagatttaaacccgaggaggagtagcagatgctttttgtaccaaatgaaaacaacgacccaagaatcaacctagccattgagatctttttgctgcaggaaatgaaggtggatgaaccgatcctgctgttttatatcaatgagccgtcgattattattggacgaaatcaaaatacgatcgaagaaatcaataaagactatgtcgatgctcatggaatccatgtggttcgccgttttagtggcggtggggctgtctatcatgattttggaaacttgaattttagctttatcatgccggatgacggtaattcattccgtgatttcgaaaaattgacgaaaccaattgttcaggcgcttcatgaaatgggcgtcgaaggggcacaattaaaaggccgcaacgacctagtcattgatgatatgaagttctctgggaatgcaatgtacgccaccaatggtcgaatgtttgctcatgggaccatcatgtttgacagtgacattaatgaagtggtcaatgcgttgaaagtgcgcaaagataaaatcgaatcaaaagggatcaaatcgattcgttctcgcgtgacgaatatcaaacctttcttaccaaaagacaaacaagatatgacgaccgaagcgtttcgtgaagagattcttttgaagatttttggtgtggattcagtcgaccaagtcaagacctatacattgactgaggaagattgggtcaaaatcaacgaaatttccgacaagtattatcgaaactgggattggaattacgggaaatctcctgcgtttgatattgaacgccgcaaacgatttccaattggatcgatcgaagttcgctttaacgttcaagaaggcaagattacagaagcaaagatttatggagatttctttggattaggagatattgctgacgttgaacaagcttttatcggcacccgctatgataaatctgcattgaaagatgtgattgatcaaattgatgtcaaaaaatattttggcaatattacccctgaggatttgttggaattagtttattgattttccagcaaatcaaaaaaagatgtggatataacgaaaatctatagaataactgaaatgcactaagaaaaagcagccacagatcctacgatctgtggctgctttttcttttagtgaacatgccgtttttttacgggttgcgcttttttctttttgctctttgcttagtaagctcgggcaatccaaacggtgtgtttagcaggtttcccgctgacgatgtcaactgttttttccataggagcttcaaatgggatatttctggtagtaaagccagtttcttctttgatcttggcttcagtttcttctgtcccgtcccaaccaattaagacaaaaccagtgactttatcttcttttttgcaggtttcgatatgtgcttttaactcttccagtgtttcgatatcgtaatactcgttctctttatttctgttacgagctgcttcaagcaaacgtggtgtcatcgcagccaattgctgatccacgaaatcagcaaggtcatcaaatgctacggtttgtttttcggcaagatcacggactttgaccattacatgcccattttctaaatctcttggaccacattcgattcgtaagcaagcgccctttaattcccactcgttaaatttgtaacctggcgaattgtcagaatcatctaagcgaacacgaatacctttggctttgaaagatgcaaacaactcttccaatttttctaaaatggcaggatttttcttccaaggtccgactggcatcaagacgatttgcgtaggggcgatcgttggtgggaaaaccaatccgttttcatcaccgtgagtcatgatcaatgcgcctaacaaacgtgtagaaacaccccaagaagttgtatgtgcataggtatgtttgttttctttcgataaataagtaatatcgaaagcttccgcaaatttcgtccccatataatggctcgtaccggcttggacagcttttccatctttcatcatggcttcgatggagtaggtatccaccgcgccagcaaaacgttcagaaggtgttttttgtcctttgtacactggaatggctaaaaattcttcgcaaagacgtgcatattcatccaaaattcctaacgtccgctttcttgcacctgcttcatcttcatgggcggtatgtccttcttgccataagaattcagaagtgcggagaaaaggcagtgttttcttttcccaacgaaaaacattggcccattgattgatttcatatggtagatcacggtaagaattgatccaatcagaaaaggctgaaccgatcatagtttcagaagtaggacgcaatgctaatggttcttctaatttttcattaccgacttctgtcacccaaggcaattcaggagcaaatccttcaatgtgatccgcttctttcgtgaaaaaactttgggggatcagcattgggaaatacgcattgcgaatgccttctgcttttaaaaagcgattaaattcttcttgaatatgttcccatagctcaaagccatcaggacggaagatgattgatcctttaactggcgaataagccatcaattcggctttttgaatggtctgaatgtaccattctgtaaaatcatttttttgtgtcattgtttttcctccttaaaaaataaaaaagcattccgtcctataaaaaggacgaaatgcttggatttcgcggtaccacctttgttgactattgctagtccaactcatgaaggataaggtcttcacaccgaccgttttgcggtcactaccattggcaggttcttcttattagcgggtattggatttccagcttgctccaactctctttaaccatcataagaatactgatccaaatcttacattcatgctaaatcgaaactcggaaaaaagcaagctttttttgtcattttgttattcattactgactagctctaggtaatctggcaacccatctgaagaaaatgtcagagaaaaacgagtggcttgttcctcatgtaagaccgagcaagacccaaaattttgctgggtcagtttttcaataatctgaagatcaaaatagttttcttcttcaaaggtttcaatattcggcatggcttctttttccgaagtagccaaagttggaaactgacagctgacgaacaattgattctgctgtttgatagcacttagatgaatcttccgcagggcgcgatctttgagtagatacgtttcccgaattgcatagtccattaaatgagcaaataattgtagaaaatcttcttcagctagttctttgattgcgggaatatccacatcataagagaattcaatgcttttttgctgagtcaattgctgataacttgtcaatagcagggttgttagagaatgatcttcacttttgattggacaggattcttctagcgtctgctcgattaggttgatttgatcaaaagctcccagcaaactgttgtcttccagcatgacttttgcagtattcaactgtttgcgaaaaccgagaaaagcttgttgccattgattgatttgttgttgaattatcggttgttgttcttcatacaagcgaatcttgagtcctgcgatatcctgtttttttgttttcccctcattatagaaaaacaaacgcagcaaatcatagcaccagcagacaataatcaagagtacgaagaaaatcgtattccaattgatttttgattgatcgctgtttaggacatcttgaatgtagataaagcagtgaccaatcgcgaataaaacgatccagggagaacaaagaacaaaaaattgattctttttaaccgcttcatagatggcagcaaaggatgtcacaagagtgctaaaaatattcagtaaatggatataatccataatttccggcaagtggagttgatgggaaaagacagataaaatggctgctgcaccacaaatgccatggaagatcacctaaatcttgtacttctgttgaagaacttccattttcgataaataaaagccgatcaagaacattggggtaatgatcgataagacattcaacatcactgaatttatggtggggttaaagagcaaccctccaagaatatcgccaaaaccggcttctagtccagctgacagtgcaaaagcactgaataataatttcgaaacgagtaattttcgtttcttaactaatttaatccctacataaatcaaattaagcaagctgataaaacctgtcagaagaagcatgaaaatattgggaatcgaatgacgaaagacataactgactaaagcgtttgaagaaccaagaaagacctcagcgggatatcctgaataatttttgaaaggactagatacatagatacgtagtgtttggccttggtaattttctggcaaggtgacaaaagagagggttttcccaggattcacaagaccatctgctacttcttttttattggtatataaaagtttatcatttaaataaaccgtcattttctgatgatcgcccaccaacagcaatgtcgggtagtagtgctcattggtgattttacgttccattaccaaattttcattggtaggaatattaggcaaaaaattcacatagttactgtcgaaagttgtttctggttctgctgcagaataatacagccaatcttcctgtttttcaatagaaggaagactgatcactggattaatcagagcagaaatatagaacaagataattcccagagaaaaagcagaaatcgttaagaagggaattgcattcttcaagtttagtttgttattttttttaacatatatgaattctcctgttttttatccacgtctagaataaaacaaaacaattgattaagtcaaatgataatgggtgttatgccagaaataataaaataactaataaaaaaaatcatttaaaaaagcggactcatattatttgaaaaaatcattaatcgttataatataaacgtaatatacaaaaatatcaaaaataaaggagaactgtgatgaaaaaaatttctaaaacaagtatccttctttcttttacaacattaattattatgctttttcctttactcatgattgttattccaaaaatgttagggttacccatcgctattgtgaagagtgacgcaatggaaccaacatattcctctggaagtttattatttgttaaaagtgtggatgcagaaaatttgattgtcggcgaggcaatcacttattttgtgaatcaaggggaacaaatatacacgcggcgaattgctgcaattgatcaaaatgagcaagtgatgtatacgatcggagacattcaagaccacatggaaacgaccaaaatcagaaaaagtcaattacttggccaacctttgttccatttgcctcgaatcggtcatctagtcacgagcgaaactgtttctattgtaaaaaagctttatttggttttcaccatttatattacagcaaccacttttttggtgatgatttctcagatcaaacaagggaaacgaatggtaatgtaagttccactaatcaataacaaataccgcaaacaagttcagcaagtgctgtcctgtttgcggtatctttttgtttagaatcagatttgttgtttattctatcccttttttttagcttcatactggaagcaaagtaaggatcaatccagcgccaagaagtccaagtccaaacaaccaatccttaagggtgactgaataattcactgcataggttcgaggtgcatcaccgacaaatccgcgagattccatggctgcagctagaagttctgaccagcggatcgatttgaccatcagtggaatcagtggttttaaggatagtttggaataagtgattcctcgagatttcagactaaactggatgttgcggtactctttaggaatcataggtgccatatgaaaggctgccattaagccataagcaaaaacaggaggcaagcgaagttgctgttgtaaagaatagatcagctctgttagtgaggtcgtagcggcaaagacacttcctaatgtcccaaaacaataaacgcgactggcgagacgaatgccataggcatatgccgctgtcgtgctgccgttttgaccttcttggaaaaataatagcccggtaaaaaagatcccgactgcacttaaagacaagagaaaaagtaacttgagcaattttttcagaggcagataaaccaagagcagcaacaagaaaaataaagtcaaactgctatttagcaacaaattatcttgaaaagagacgagcaaagccagcgcggataaagtcagcagcttgactgttgggtttcggtacttcattggaagactcctttacaaaatgattgaaatcgaatgttcggtcacaaaaatctgacagaagacgcaaatcatggctaatgatgaagaccagtgtaccgctggccgctttgtctgccaataacgacatcaattgccaagactgccgcaaatcttgtccataggttggctcatcaacaagcaaaatcgggatctcacgatcgatcaaacaggcaacagctaatcgccgttgttgtccttggcttaataggaaaggagaatcttcctgtttctcccatagtcccaattggttcagcttttcagagagatcctctctttcttgaccattggctaattcttgtgccacggaggaagctagaaactgatcctgcgggttttgcatgacccagctcatccgatcgaaaggacgactgcgagaggtcaagcattgctcttggtaatagatcgttccatcatagggaacttgctgcaacagggctttaaaaaaggttgattttcctatcccgctttttcctgtgatgcctattcgttctccggtcgaaaagacttcgtctttgatcagcagagaatgtctgccaattggcaaacgaaaattttcaaaccgcaagaggggctgcggctcaataggaatgagggacggtttaatcatagtttgtcttagctgctcttcttgctctaaaagcaactgagaaggaaccgactgaaaagcatctgttaataggagccattcctgcacccagtcagcgaccggtgcgacttgatggtcgattaaaagaattccgattttctttttttgttgaatttctgttaatttttcaagcaatgattgggcggtcagcgaatcgagattagcgaaaggttcatctaatagaagatagcggctttctaaaacaagacagcatgctaacgctactagttgtttctccccacctgagagggttgtcagcactcgatcttctaaatgacgaatctcgcaaaaatcgagtgccgtctcaatacgacgagtcatttcgtttaatggaatggctctgttttccaaacaaaataacagctcttctcggggagttcgcatacaaaactgcgtatcgggattttgaaacatcaaactaacggacgcaatccgttgtacaggggataaatcagtaaaatctttctcatcgatcacatagtgtccagattcgaacccttgatccgacaaaccggctaataagcgaaaaaacgtactttttcctgaaccagaaggaccatagatccctttgatttccccaggatctaattcaaaggtagcggtaagtttttgctcatcaatcgtaaagacacaggagtctagtgctaaactcattctttcacacggcttcgtttgaagcaagtatgttgagcaatcggatagctattcaaaacccccatttttgctaagtgatcacaaaccactttaacaaggacagctgaaaaaaggagcgcggaaagcagacggatcacgaaaatagtcagcagtaattgccactttaaatcaagaaagctggaacggatcatgccccaaataaaactggtgacagtcgctcccaaagctcccaggatcaaagaagaccagccgaattttcgatagcgaaaagcggcaaagccagcctctgtgccgattccttgaagaaagccgctgacaaagataattggaccataaaagttacccatgaaaacctccaacaaagcggcgatcatttcagtaatcgtggctgcacctggttttcttagtacgtaaccggcaaatgcagacgccataaaccaaatcccaaagagaaattcattcgctagaatggcgaggccaaatggagttaacaaggtgctgagtaaaacccccaagtgaacggcccctaaataaacgacaccgaatacgagagaaacgatgcctaccatgatcacatcctttaattgccacttactcatgcaaagaggcctccttcaacgagggactattgactgaaacggttccttcaagaacataatgaggcagcttttcgtgtgcataggccagtgcttgttcaaaataggcgaataattgagcggctgtgccagatagcagcgtcacgtaatgggccgattgcggttgtaagcccatggcatccgccaacgagacgatatgcgcaatttcttccatataatcttcacgtccaaagacataaaaagaatatttgcactgaacgatgaacgtaccttttgcagtaatttgctgatgatttggccgttcatgcttgccgctgagaaaggcatcaccagccagatctcctggacagcctttcgaaaaagtgaactcaccgaccaaatgtgtttttgggtcataggcattgacaaaaagagctgctgccgcatcaatcacactggcagcttcaccacggtagagtgtactgaaaagatctgtctgctgccaaacggctgtggtatcggtctctttgatgcttcgaagaatgtgagaggcaaaatcatctttcattggataaagactgatgcggcatcccgtgatatcgatttgattcattgaacaattttccatagtattcttcctttcgaatgattttctgtctacaaaaaaagcgttcctccttttctatccacgggtagacagaaaaatgggaacgcgaaataagctgcgcaaccacttccctacgttggtattaaccaaatcaggttcaaagggaccagacaaactgtctatctcagcataaagcgcccctagtggataattcgattcaattactttctgagtgtagcacagacgatttgaaagaacaagtcagacagcgcgagcaaaaagacaaatgaatcactgcagatatgaaagaatagacatataaaaaacatctttttaggtgttgacagattgttttcccttgtgtaaagtaaataatcgaaagtaaaacgtaagtgttacgatttgtgaaaatcaaatcgtaacaggctctctggtgtttttttaggagaaatgatcgttttgctaaatcaaaaaggggtgctggtaaagagatgaagaaatttttaaaaataacaggtatttcgcttttaaccatagggttggctgcttgcagtgtgacaaaggaatcagcgaatgaacagacagaacaatcaagtgatccaacgattcaagtcctcgctagtttttatcctatgtatgattttactcgcaatgtggtgggaaatgaaggcaatgtcgaattgttgatgccggcagggacagactcacatgactatgaaccatcggctaaagatatggcaaaaatccaagaagcggatgcctttgtttacaataatgagaacatggaaatgtgggttcctgccattgaatctacattgaaagaaggagatgtcaccattgtgaaagctacggaggggatggtgttgctgtcgggtgatgaagagcatgaccacgatcacgagcacgatcatgaagaagggcactctcatgaattagatcctcatgtctggctagcaccaagccttgcaatcaaacaagtagcaagcattcgtgatcagctaagcagggcttatccagaaaagaaagctgcttttgaaaggaatgctgcggcctatttagaaaaattgcagtcattggatgattcttatcagtcagcatttaagaatgccaagcaaacgcattttgtcacccagcatgctgcttttggctacctcgctttggaatacggactgacacaagttccgattgccggactgtctcccaatgaagagccttcagcggcacgtattgttgagttgaagcattttgtagaagataccgggatcaagacgatttactttgaagaaaatgccaaagacagtattgccaaaacactggcaacagaagctggtgtcgatttatccgttttgaatccgctggaaggattgacacaggaacaaatggatcgtggggaagattacatttccatcatggaacaaaaccgagacgcattgatgctgactacttcacaagccaatgagaaagaagtgaaagaagcagagaaagaaaaaaccgtttataatgggtatttcgacgacgcagatgttcaagaccgctcactcacggactggaagggacagtggcaatcggtctatccttatttgaaagacggcacgctggatcaagtttttgactacaaagcaaaacagaataaaagcatgacggccgaggaatacaaagactattatacaactggctaccaaacagatgttgcagaaattacgatcacaggagatacgatggcatttacctttgaagatggcacaaccaagaaagcaacctatcaatatgtaggcaaaaagatcttgaattaccaagcagggaatcgcggcgtccgttatttgtttgaatcaaaagataacgatgcagccttcaaatatatccaatttagcgatcactcgattgcaccaactgattcccatcattttcacctttattttggcaatgaaagtcaagaagcattattgtcggaaatggatcattggccaacgttctatccgactgatctgtctggattagaaattgcacaggaaatgcttgctcattaaaaaaaagattgacaattactgctcttttcgtcaaagttaaactgatagaaaggagcggtatttttttggaaaaaacattgaaaaaattagcaaaagtaatcgatcacatgatggatcatgtcgcgttgttcggtggtccgagtgttgtcagtaatgatgatttagatcattacttagatccggttttttatttgattttttgtgcagaacaaaagacgaataaaagaatgctgacagacaaagagtttgtcgaatgggtctatacggaaatgatgcctcaagagattccttatgatttgaatttcctcccctttgctaaattagctattgaagatttttattattgcatgtataaagaacagcacatcacaaaagaacaataccaagagattatctttgttcttgcagaaaaacagcctgtgttttactctcgcatgtcaaaaccgcatttctggtcttcagagaagaaagcggcaatgctagagatgcttcatgatgtcgaaccggaagatcatgatttggttccgatcgaacatccctatgaaaatcaacgatcgccaaaaatcgtcccttttccaataaaaaaagttcctgaagctagcgaagaaagaatcgctgcatatcaaatccgtattgatttggaaggtttcaagccgccgatttggcgaaggatgctcattcctgcaggcattagttatgaacaactccataatatgatccaaattgcttttcaatggcaggattcacagctctacctttttcttgccggcaataattcaatcgatgtgccgaacacggaacctacaaatgcattagtgatcgaccatgatttccaaacctgccaaactctgacctacatttatgacatgggtgctgactggacccacaaaataaaaatcgagaaaatactgacggctgctgaagcaggtgaaacagtcacgcctgattgtctaaaagcggttggtgatgtgccaaacgaagagcaaccagaggaacaaagagaatcagtgaatgttgaaacaatcaatgaagaactccgggattactgggaatctgatccgtccgactaatttttttctcggaataagtgcaataatcgattcatacgatggtgtgacgaatctgtttaacagttcgtgacatcttttttgatcggtccttgtttgattaaggtgttgaccattcatgaactacatcaagttagctgatatagaaatactcatttctgtggcgacacgcctggtttgatacagattctaactttttaactctagagccaatgattcagcagattgattttcgagtacattcgagtacaatagttcgtaatgatactggacaagcgacgatgctctatctgctgtgaggtgcatctttcaatcgctctagaagatggactatctgttctggcgacagctgagagcaagtgaggggagtttttatgaaaaaacgagaatttatcgttcaagatttgcttagtaaaatttatcaggaagaatttattgaaggaaaattaccgaatcaaagagaacttgccagaaattatggcgtttcccgctttacgattcaacaagcaatcaaaaatttagaagaaatcggcatcgttcgtgtggtccaaggatcgggaatctttatccatgagaagtgggtcaaaaatcccatgatctttaattccttgacacggactccttacgatcggatccactccaaaatgatttctttgagtaaagcacccgctaccccagatgaacaaaaaatctttcagttagcagacaatgaagaagtttggacttttgaacgggtgcgaatcgtcaattataagattgaacagctagaaacgtcgaagctaccggtaggattatttcctaatgtcactcaagaggtagtagaacattcaattcagcgctatgttgagagttgcggatatcggatttcccactacatcagcagttataccccgattgcgacttcaatggcccagtcggcaatcttgctgtgcaaacgggggaccccagcgatgcaaatcacgaatcgggcaattttggaagatgggcgggtctatgaattcagcaacatcgtcgccatcgactatgcagtcacctatattcgacctttcgatcgagaaatccatcgttcacgcatcgattgatcggcagaggaagagccacaaatttcctagacgataaatcaaaaaaactcagagctctgattcaacaatttgagtcaggctactgagttttttaggattattatttaaggtgtgattagtgtaccatccggcgttctgctttgtgtccactcatgggggcggtaaacgaccggaaaatcagccgcagcttcttcatcaaatgtaataccgatcccgcttttttccattggatagaagaagccgcctttgggttggggactgccaacaaacacggattgggtatttgccggcaactcgattgtttcttggatcgcggcattgtgcagatggatattcaaatgcgtattgactgccaagccgactggactgatatcagaaggcgtatgccaggcaattcgaacccccatcgcatcgcaaaaatgagctagcttcaatgctggcgtaatgccgccaatctgtgatacatgggcccgcatgaaatcgatctgccgatttttgactagttcttgccattccattggattattgaacaattcacctgttgcaatgggggttgctgactgactgcgtaattgtgtcagccagtgactttggtcaggcggcagaatatcttccaagaaaaagagctgataaggttctgctgctttggcgaactgaatggcttgattcggatggaggcgttcatgaacatcatgcagcatttgaaattggttgccatatttttctttgatcgctgcgaacatcttcaaagtcgtttccatataatctgtctgatcaaagtaagagccggagattggttcttcgggtgtttgcagctggcttggattcccgccatagaacccgagctggcaacgaatatagcgataaccggctgccaaaaagcgatcgatttcgtgatagagatcgtctaaattatctgctaccgcatgagtataagcagggatcgcggttcttgcttttccccccagcagttgatacagaggcatatcagctaactgtcccttgatatcccataatgccatatcaataccagagatggcattgtttgtgatcggaccgttgcgccaataggaattgacattcatgacttgccagatgtcttcgatttcattcgcgtctctacccatcagaaggggacgtaaatattcgtcaacgactgttttgactgctaaaggacgaaattgaaacgtactacagcctagtccggaaattcctttattggtttctactttaacgacaacaaggttatggcgatcaggtttgatcgcaaaggatttgacgtcggtgatgatcgttggtgtcattttattcactccaatttttgtatctagttgatatagccattgaaacacgcagagcaaccgctgtcaatttggtccaaaaaaagatggctatggctcataaaaccagtccaattttagatggattcttatttatttgttgatacatagcctttttggtctgtttttttaataaaaggactggttttacaagcgggtgcagccatgctactatgtgtgtgaaaacggacccacttgaaaaggcgcctcaagattcaagtccgttagcaaacaacaggaggaaaaaatgatgatgaaagaagacatcgtaaaacagatcataaaagatgttggtggatccgagaatatcaataatgcttggcattgtatgacgcggcttcgttttgatttgaaggatgaaaagaaagttgactatactgctttagaaaaaatacctaaagtggtgggaacgaaatatcaaagcaatcagctccaagtggtgatcggtacagatgtagcggattattatgctccattagccaaagaacttggtttggatgaaaagagtcaagagtcttcagagaaaaaaggcgctgtctcgttgtttatggatacagtctccggtgtattcggaccaattgttccagcaatcgctggggcaggaatgattaaagggttgatggcaggattggttgccttaaatgtgatttccaatcaaacagatacgtatttagtcattgatatgatcgccagcggcgtatttaccttcttgccattttttgttgctgcttctgctgcgcgcatctttaaaacgaatcaatacttggcgatcgccattgctgcaacattacaatttccaacgatgacgaatgcagttgctgaaggcaatatttcggcctttcgactgtttggggttttaccagttcccgttttcaattatgcgggtaccgttattccaatcatttttgctgttttagcattaagctacatttatcgctgggtagacaaggtattgccgcaagttctgcggaccgtctttacaccgacgatttccttgtttgtggctggactgattacactgacagttattggtccaatcagtattcatttaggcaatttgcttgcagatggtgtagctggcttgtttacgatttctcctgtattggcaggaattgttgtaggtgctattcgtccaattgcgatctttaccggattacaccatgcaatgacgccaatcgcattacaaaactttgccaatcaagggtatgatatgttgatgccaatgatgttcatggcaaatatggcgatcaccggcgcaaccgcagcgatctactttaaagtaagatcaaaagaagaaaaatcaatcattttgtcctcagctgtgtcaggattgctgggcatcactgagccagcattgtttgggattttatcaaaatataaaaaagcatttttagcagctaccatcggtagttcgattgcatcagcgttcatcagcttttttggcgtaaggatctatggctatattttatccagtatctttagtttgccggcttatattggtgaatactttatctatgcggtcctaggtattgtcttggcgatcggttcctcttttgctctgacttatttcctagtccctaatcaagcagaaacagaaaccttcaccaacgaacttgatttgcatgttgtaacgcaaggagaatacattccattggaagatgtacccgacgaagtgttttcaacaaaaatgatgggtgaagggtatgccattcactctaaagacggccaaatctattcgccagtcagtggtgaagtcacttcggttttcccttccaaacatgcggtgggaatcaccacatcgaatggtgtggaagttctagtccatatgggaatcgatacagtttctcttgatggcaaaggctttgaagtattcgtaaaagtaggagagcaagtaaccccacaatcgaaactagcagcgatggacttgccttatatcgaacaacaaggcaaagaaacgatggtcatcgtcctaatcacgaacatggaacgtgtccaacaattttcaggaacgatcggtcttgaaggaaatcatcaagccggtgccctattagaaaaggtaattttaaacgcttaaattcaagaaaaaaagaggtttaacaagaggggagatgcacctggcaaaaacagctgcggcatattctgtccaattgttcgaaagaaagagctgcgacaagacttttgttacagctccttttttttaccatcagtgacgttgagtaatataggcagctataggtttactatatttctcaaaaagtttttgcttttcagaagggttctgaccttgattaaaatattcagccagtaaataaccgatatagggacctgtggttaatccagaagaccccagtccgctggcgaccactaatcctggctcactgggaagcagtccaaaaaatggcgcaaagtcagaagtataggcccgtgttcctacgcgaactgtcattggcgcagcaaacaatttctcgggggctgccaaaaatgaaccgatgccagtcagcaattgttgctttgctgcttcagtgggagtcagatcccaaccgccatcattttcgtgagtcgctcctaaaaggatcttcccattcgcaaaaggaatcaaatcgccttcgccttctaacatcgccactggccaatcttttgctgacgctgtcgtttcgaaggagagcagctgtcctttttggggacgaacatcgacgtggtagttcaagtgttctaacagttggcctaatcctggtccggcggttaaacaaacatgatccgctgggatttctgcgtatgtagtagaaacgacccaatttttttctttataaagtctagccttcccttggacgaaaacgaccccattggtacgggcccgttcttctaggaacgctagataagcagcgccatctagtcgacctcctccggaaattttcaaagccggtagtggtttgagcaaaggtaaagcttgctgcgtttcagcaggagaaagacaggtgatttgaccgatttccggtgcctctttgcgccgttcctccgccagttccgctaatgctgccaactgattttctgggcgaatgatcaatgtacctgagcgttgataaatatctgtggtcagtgagaaatcttgtgccaatttttcgaaaaaagcagccccatctttagctaattgataccatcgtttgtttcgccgtttcgaaagccagggggaaatgatcccggcactcgctttagtagcttgtcccgtagggtcgtcaaccacggtcacttggtacttcgtcgtatctagataatttgctaaggtcatcccaatgatgccgccaccgataattacgattttttccataaaactgcaaactccttttttgtttcaatcattgttccatattcttctcaaaaaatcaaagactgaaagtttctgtcgaaagtgattcccaaactgttcccatttcaaatgactggattttctcgtataatggacatggaaaagaggatattatgcaatcaatcaatcaagttttaagagataaattcggttataccagctttcgggaaggtcaagaatcaatcatcaatgccattctttctcatcaaaatgttttaggcatcatgccgactggcggaggaaaatctgtatgttatcagctcccagctttattgttagacggtctgacattagttatttcaccattgatttcattgatgaaagatcaagtagatgcattgaatgacatgggtatcccggccgcttatatcaatagtaccttatcagctccggaaatcaaccaacggttaaggcaagcatcgaaaggagaaatcaaactcctgtatgtcgctccagagcgtttggaatcagatcattttcgcgaattgctgcgctatgttcctatatccctactcgctgttgatgaagcccactgtatttcacaatggggacatgattttcgtcctagctatttacgcttagcggaaacgatccatagttttgatcagcggccaacggtggtggcattgacagctacagcaacgccaaaagttgcccaagatattgaacgactgttgctgattccaccagagaaccaagtgaaaacgggctttgctcgcgaaaatctatcttttgaagttatcaaagagcagaaagatacttatttgctgacctatttaaagatgaacaaaggacaatcagggattatttatgccagcacacgcaaagaagtcgaacgaatctatcgtttattgaaacaacaatctatcaatgctggacgctatcatggcggattaactgaagaagaacgtacgcaaaaccaagaagattttctttttgatcgtcttcaagtgatggtagcaaccaatgcttttggtatgggaatcaacaaaagcaatgtgcgctttgtgatccacgcccaaatccccggtaatttagaatcttattatcaagaagccggacgtgccggacgagatggtgaacctagcgaagccattttattatacgctccgcaggatttgcagattcagcagttttttatcgatcaatctgagtccgatattcagtatcgtcaaaatgaatacctcaagttgagagaaatgagtcaatatgggcatacacaaatgtgtcttcaacgttacatattgcggtattttggggaagacggtcccgattgtggccgctgcagcaattgcttagatgaacgagaacaggtagatatcaccgttgagacgcaaaaagtgttgtcctgtgtgaaacgaatgggtgaacgttttggcaaagcgttagtggggaaagtgttgaccggatcagcagatcagaaagtcacccaatggggatttgaaaaattgccaacctatggtttgttgaaagattggtcacaaaaagaagtcaatcaactcattgactacttaaccgcatcaggctatttagtcccttcggaaggacaataccccctgctcagtgtgtcagctgccggtgtagaggttcttttaggcaaggcaaaggtttaccggaaacaagccaaagtacgtcaattggtcgtcgatgacgaattgtttgaccaattacgttccctgcgattgacgctcgcacaagaacaaaacttgccgccgtatgtcgtcttttcggacaagacattgcgggaacttgcggagcagcagcctaaaactcctatcgaatttctacagatcaaaggtgttggtcaaaacaagttagataaatacggtgatgcgtttctggctgtgttgaaagaataccgagaaacaacagaaaaatagtgctgctttacgattcaggaaaaaacaaggagaaaccaagatgctgaagattcgttatgcgcaaaaaagggatatgacattctggttagaactagataatcatttgtcaaaagcaggattagcaaaaaagttccaagatcaacaggcgttgatcttgaccgatgaggaagaacctgtggggattcttcgctaccaattgttttgggataccattcccttttgtaccatgctggtggtcaacgaatcccagcagagaaaagggagaggaaggcacttcctccgcctttgggaagcagaaatgcggaaacaaaggtatgggatgtgtatggcctctactcagtctgatgagagcagtcagcatttctatcgaaaatgtggctacaaagatgccggtgggttgcttatggacgtaccaggttttgaacagccgttggaattgttttttgtgaagccgttgtcgatacagcctcagtctgtagaatcagaagaatgaaaaaataggagcgataggcatgtctttttttggaaaaatagatttcaacgatttatcagagacggatcgagcaatttatcattatatgtccagtcaaagtgacaagattccttatatgcgggtgagagaaatcgccatcgaatcccatacatcggcctcttctgtgatgcgctttattcgtaaattaggctatgaaagttttacggagtttcggtcgcatgctaagatgcctcaggttgaaaatgctgatatacttagcggaagcacgttattaagcgctgatcattttcctaaaaacattgagagtaaattgagacgagtggctgagaaactgattgagtgtgagaatattattttttatggtattggtgcttctgcatcaatgtgcgagtatgctgcgcgtcgattttcaactttaggctgtaatagttttgcattagtcgatcatacatatccgatttttgcaaaactaaaaaatacatctgataatatggtatttgcgttatctattacaggagggacaactgaaatcatagagttgtttaacggatttaaaaacaacccggactttacaacggtcgtaatcacaagcgattctgcaagcacactgggtagaatgagcgattttgtattagattattcggttgatgtgaagagaattaataagcacgaggatttaacaagtcaaattccctgtatgtttttgattgaagccttatcagaggctgtgcgccaactcattacatttgatagagattgaaattattcatgaccttggtacttcgtgtaccaaggtgcttttttttctaatttgcttctcgtgtaccgatttattagtaaatgcacgatgaatatcggactttttgtatactcaaggagaataaagagaggatgaagaatcatgaatacatttccagaaaattttttatggggtggagctgttgccgcacatcaggttgaagttgtgtggaatgttgagggtaaaggtgtaagtattgcagatgtgatgaccgcatgaggaaatggtatttccagagaaattacagatggtgttatagaaaataggtattatccaaatcatgaagctattgatttttatcatctttacaaagaggatattcaattgtttaaggaattgggtcttaaagtattgcgcacatctatcaattggacaagaatttttccaactggcgatgacaaagaaccaaacgaaaaagggcttaaattctaagatgatctatttgatgaattacttgcaaatggtattgagccagtcatcaccttatcgcatttcgaaatttcctttcacctatataaagcttatggtggatttaagaataaacaattaattcctttttttactcgttatgcggaaagtgttatgacgagatacaaaaacaaagtcaaatattggatgactttcaatgaaatcaataatcaagctgatggataacataatttacacacctggactaattctgcttttttatttgatcaaaataagacccaagcgaataaggaagagataatttatcaaggtgctataaatgaattgattgcgagtgcacaagttgttaagttaggacacaaaattaaccccaaatttcaaattggatgtatggtggcaaacgttccagtgtatccatattctagtaaacctgaagatcagatgtcggcacagaaagaaatgaatagacgttttttttatagtgatgtccatgctagaggagagataccccaatatgtcctaaagaaatgggatcggaaaaactattctattgatatctcagatgaagaaaagaagatattaaaagaaggtaaagttgattatatcggctttagttattatatgtcaggcactgccactactctggatgagaatggcgagttgatcaatgatttttcaaaagccaaatggttaagcaatccacatgtgaaagcaagtgattggggttggcaaattgatcctgttgggatgagatacactttgaatatccttgaccaacggtatcagatacctttgtttagtgttgaaaatgggtttggggcctgtgatacagtcgaaaatgatgaaattcatgatcaatatcgtattgattatatccatgcacatatagcagaaatgaaaaaagctgtcttagaggatggagttaatttgttaggttacacaccttggggaatcatagatatagtgagttttggttcaggtgaaatggagaagcgttatggcatgatttatgtagataaaaaaaatgacggaaaaggtacactaaagcggttaaaaaaagattcatttaaatggtaccaaaatttatcgcatcaaatggagcagacatctgatgattggtacaaggggtttcattaaggtacagaagccattaagctggtacagcaaccaaccttgatgaaacccattgaatatgaaaacgtttttatttatagtttgtttataatgttgataaaaaaaaacgtttttatgtggtgatgataatgaatacacgaacaacaatccgagacgttgcaaaagaagcaaatgtgtcaatcgcaacagtttcaaaagcgttaaatggcgttgatgttgttaaagcatcgacgaaagcaaaggtcatagcagctgcgaagaaccttcattatgtgcctaatcttatgggaaaggaattaaagaaaagtaggacgaaaagaatcggattttataccacaagtatcactggtccgtattttagtgttctgattgaatccatagcaagagaagttgaaaaacatggttacgctttaaatgtgtttatttcaatggaaaaagaagttgtcttgacgagtattctgggaggtgctgtagatggatttattggatttgaagatatgcttgatcaagaagatcttgagataatcagaaatgaatccgtcaatgccgtttttattgatcgtaatattcaagatcatacatttggtagtattgttttcaattccaatgaaagcgctgaatatgcaacatcttatctgatagcgaaaggccatcgtaatattgcattcgtcaaaggctttgatggtgtttatgatagcgatgaacgattcaagggatatcagcaagcactaagaaaagcacacattcctctaaagccgcattatctaatagaaggaagatttgaagaaaatttcgcatatcaatcgacagaaaaatttttgcataagcaaaaagatttaccgacagcatttctagcgggaaatgatcttagtgctatcggcgtaaccaaagcgattgaacatgcaggctatcatgtgccgaatgattttagtgttgttgggtttgatggaatcgagctgttgaaatattttcgaccgtctttaacaacaattgtgaacccaatcaaagaacaaggggagcttgcaacgcaacatttagtaaagctgatcaatggggatgtttcaggaaaatcctttgtattaaatggaagattggttgagggcgaatcagtatatcagtttaatagaaatgagtgatataaatgtatttgggaatagatattggtggaactacaatcaaatatggatttattgatgataaaggacaagtttattgtaagcagagtatcaaaacgatcgataatagacatcaattcttggtaaacctacaaacaattattgaagagagtcagaggcaagaaccaattgaagggattggaatcagcgcaccaggaattattgatcaacacggcacaatgattacagcaggagcaatcaagtccatctatggtgttcgtctaaagcaagaattacagaagataacgaaagtaccaattgttatcgaaaatgatgccaatgctgctgctatcgcagaacaatggattggccatgctcaagggattcccaattacatatgtatggttctaggaacaggcataggtggcggtattatttatcaaaatgaattgatcaaaggtgcccatggcatggcaggcgaatttggctggatggttattaaggaaattaatgaaagcgttgacatagaggcgatgtctttgaatcagcgtgcagcagtgattggtggtttatgttctcgttataatgaaataatgttaaagaaagattcaaagttcaaaccaatttgggatgcaaaagaaatttttgctaaagaagaggatgacgatattgcccacgacctcattcatagtttttatgaagatctatctgtcggcatattgaacttgatcagttgttttgatcccgaattggtattgattggtggtggcataagtgcaaacacgttatttttagagcgattgagctccaccatttcaaaaatgacagaaagacatcaaagtattcattatttagtgggaaaaacgatcgcacctataaaagcagctaaattgatgaatgatgctggcatggttggagcagtatatcaagtaaagaaactgattctaaatgaggcaacaataaactgaaagtgaggggaacagatggaaacttccgtgcaaaatgcaaaacgctctactaataagataaaaaagtggttctctgttttttttgaacaatgggaattgcaaagtatggtctggccaggaattatctttatgatcatttttaactttattcctatctatgggctgatcattgccttcaaaagatatacagtcatcgacacacttgaaacagcaccttgggtcggctttgaaaattttcagatcatattaaatgataaatttttttggggatcagttgtaaacacgcttggtatcagcttcttgaagctactgataggttttgttttaccgattatcttagcaatcttgatttttgaactcagacaaggtgtatttaaaaaattggtccaaacaatctcttacatgccttattttctatcatggattgttctaggcggtatgttgattaattggctgtcaacaaatggattactcaatacaatattgagtggacttggtttttcaatcaaacatgaaaactatcttttatcaacgaataaatactggtggattgcggtattgtcagatatatggaaaaacactggttggggtacgattttatacttagctacgttatctaaaattgatccctcatattacgaagcagcaaaaatagatggggcaactaggtttcaacaaattatgaaaattacattaccaatgctaaaaggaatcattagcttaaatttgattctgactataagtggattactgggatccaacttagatcagacaatggttttgatgaataatcaaaatcaagcgaaggcggaagtgattaattcatatgtatttagaatggggatagcgcaaggcgatttttcttatgctactgcagttggattaggtgtgtcaattgtatcagtaattttattggtatgttcaaatcaaatgaccaaacgactaaatgacaatacgtccgtattgtagaaaggagcgttgtatggaaaaaaaagtgatgaaaaaggatgtagatagtcgtttattcgacattttcaatattttgatcttaaccattttcaccttgattatcgttattcctttatggaatgtggtggtatcatcattcgcctctggaagtgttcttgctaaaggtgactttgtattctggccttctgaactgtcactagagaattatcgagcagtattcagagatgggagtatgttgcaagctttctttatttcagtttctaaaacaatctttggtgttttaacacatgtatttttctgtgccatgatggcttatgctatgagcaaagcaaatctgaaaggcagaaaattatattctgcgatgggtatcactacgatgtttttttcaggtggaatgattcctacgtacttattgtttagacaaataggtttgttaaatagcttctgggtttatattataccagcgctgttaagttattatgacgtcattatattaatgaatttttttagaaatgtacccgattcattagaggaatcggcaatgattgatggtgcaggtcattggcgcatttttttgcaaatatttttacctctgtccaaaccagctctagcaacaattgccttgtttaatggggtaaaccaatggaatgactttatgacagctagaatttttattactgataagctctttacccattacaaatgaaactatatgagatcattgttcaatcacagacacaagggatgcaaaacatcggaacggctgtggcagaaagtacaaccaaaggtgtccaacttgctacaatcgtggtcacaacgattccaattctgattatttatccattactccaaaaacatttcattgctggaatgatggtcggagctgttaaagaatagaaaaggggaaaacaaaaaatgaaaaacttgagaaatttagttttgctgtttagttcggtgttgttgctaggtgcatgtggagggggagaagataacgcaagtcaagaagcaaaggatgtagatattagtgagcgttataatctagataaaaatacgccagcatggcaattggataataaggaagaagtcacagaactgacatggtatgttaatgctgattggtggaatgatgaatggggaaatgatgtcgttacaaaaaaaatggaagaagatttgaacatcaaagtcaaatttatcaaaggtgatgatactaacttaaatacaatgttttcaagcaatgatatggcagatatcgtcacaatttttgattcaaactcacaagttgcgcaaaaagctgatagttgggcctattcattagatgaacttgcagataaatatgatccttattggcaaactgtagctgcaaaagacacattaaattggtttcaattagatgatggaaaaacgtatggatatcccaattattctaatacagcagaagattatgatagcggtttaattcctgctaacacaaactttttgattcgaaaagatgtatataaggcaattggtgagaataattttgaaactgcggatgatttcatagcgggaatgaaatctatcaaagagaaatatccagaacttgttccctttggtttcaatgcgttgggtgatggggctggatctttaggtgatgttttccaagactatttgggtgttgatctagaaacaaaagagggtaatttttataaccgtaatctagatcaagagtatttaaactggttaaaagtgttgcgtcaaattcatgaggatggaaatttgtcggatgatagtttttctgatgatggtacagcttttgaagaaaaagtgaaatccggtcaatacgccacaattatggctagtggtacagcacaaatgagtggttttttacaaagctggttagctgaaaatcctaatggtgagtacattgcaatcaatggaccacaaaatagtgaagggaaagagcctaaattaaatcaaagtggtattactggttggatgatcaattatattagtaaaagtgctaaagatccagctaaggccatgcaaatcttcacttatttacaaagtgaatacggcggcattctaactacttttggtattgaaggagagactttccaatatgacaatgatggtaaaattgaattactgccagaagtgcaagagatgaaagataatgattcagatcgattcaaaaaagagtatcgactaagtgagtttattttctttggtcatgataaatatcaatcaatggctagtgaaagtactcagacacctgccttgatacagccaagagaatggggagaaggaaaattataccctcattttattctagaaaatattgatcctagttcagggactcaagaagcacgtaatctctctgcaatcaatacaaattggtatacaacattagtctgtttgattcgctcttcttcagaagaagaatttgatcaagtaatctcttcatattcaacatttttagatcaaaatggttggtcagatattgaggcaattagaaacgagaaaattgctgagaataaagagaaattaggcatcgaataaaaaggtggtagtcagtaatgaaacaaatatttaatattgatggtgaagtatacagtttcctacaaaaaatatatcaaatgatgctattaaatctattaatcatcttttctagtttgccaatcatcacagtgccttgtgcattgattactggctaccagcttttaaaagaatacaatcagcaagaagttaccctaacaaaatacttcatgctgtttagaaaaaatctgattctttcattcaggttaatcatcgctttctgggtgatctttttcttactgtttcttttactagcattcactagaagaactatatttcaatttttgatattactttttattgcattttttattgtgtttctttcgaatgtattcattgtttgtaccagccaaatgtccattcggtccatagtggagttttcattagggataacgttaaaatacgtaggttgtaatattattggcttagcgataatgcttagtagttttgttttacctgtgtttttacctagattagcattagtatgggcgttatttggaataagtattcctatggtttttcaagttatgatccataagcaaattatgaagcatgtaactacaaatcaaatagaacaggagtgatccattgagttttgaatattacacgacaacagatgaaatgaatatgtttcagcttgaacaatctccgtttacacaaaataaaaatgagtttgaaatcaatgtcaatagccatcaaacttttcagaaaattgatggatggggaacttctttgacagattcttctgcatatttagttgataaatgtttatctgaagagcaacaaatcgcagtcatggaagcgttatttgattcaaaaaaaggaatcggtctttcaattctacgaaacccaatgggtgcatctgactatgcgcggcatatttatagttatgatgatatggaaaaagatcaaacagatgagaatctgattcatttttctatcgcacaagatgaagaaagtatcattcccctaacaaaatatgctaagaaaatgaatcctgaactaaaattatttatgtctccttggagtgctcctggatggatgaaagattctcaacaaatgattggtggaaaattgttgttgaagtattatgatacatatgcccattacttcaaaaaagtgattgacagttatcatatgcatggattagatatatatgcgattacaccacaaaatgaaccgttgtttgtgccaccgaattacccaggaatggagatgctggcggatgaacaagcaacttttgttgctaaatacttaaaacctttgtttaatgataataacattcggacaaaaatattaggctatgatcataactgggatagaattgattatccattagaaattttggataaggcagaagcggcctttgatggcatagcttggcactggtatggtggtaatgtaattaatcaatcaagagttgctctattttatccagataaagaaattcattttactgagggatctggaggagattggataccagcctttgaaccagctttcagtaatctaatgagaacagggatcaacatttttagaaatggtgcaaaatctatgacgctttggaatttagcgctagacgaaaataatggacctactgttccgggatttggaaaaagtacttgtcgcggccttgtaaaagtggatcaacaaacgaaaaactatgaattgacacttgattattttggtctggctcatttcagtaaatttgtccgccctgaatctgttcgaattgaaagctcgaatgatcggcatatccaaagtgttgcctttcagaataataataaatccattgttgttattttgtttaacgatagtgaaaaggatgcatctgttaagataacgatagatacttattcaatggatacaatctatttgtcagcgaaaactgcgatgacgattagagaaatatctaataacgaggagtaggcggaaaatgatctgtttgaatcgttatgtttctaaaaatcatgatgcggaaaatgggaaaatcgtctttgctggttcttctttaatggaagaatttcctttggaacaattgtttctcgataaagaaataattgtttataaccgcggaattagtggagcaacttctaaagactatcttgaaatttttgatcgattgatactctctatacaacctgtacatctattgatcaatattgggtcaaatgatctagcagacgagtgttttgaggatagtcacttattagatagctaccgccaaattttcagtaaattgaagaaaagtctaccacaatgtgcagttacttttattaagttttatccagtaaataccggaataatgcaagacgtttcaaaaaaacaaggcgagcaatggctactgcaggcttcaaagtatagaatcaatagccgtgtgattgaagcaagtgagaaaatcagcaagcttgccgattcaaatggatatgagacgattgaagtcaataatttgcttatagatgaaactaaacagcttgatactttgaataccaaagatggcatacatttaacagaagctgcatatagaaaaattttccctttgatatatcaacatgtggatttagtacgaaaggtgaataaagaagcatcggatggtaagaaatgaccattcgatgcttctttttatgaaacacattccaatctatgtaacaggttgatttgaaagcgatttctataggaatgtccttcaaacttacctataataaacctaccgataaaaaagcaaaggagtatcatcaatgaaagaaaaaatgatggatgcgatgcagaagttttcaaaagccatgtttgtaccggttctgattttgccaattgctgggatcttgattgccattggcaatgtttttaccaatgttcgtttgatcgaacgttttccatttttggataacccaatcaccacaggttttggcagcattctctctgcctcacttttaccgatcttaacgaatctcggcatcatattttgtgtagggatcgctcttggtctggccaaaaagaaaaaggcggaagcggcgtttactgcattactaggctatctggtgtttttatatgccatgaacaaatttatggaacttcgagggatgcttgtagccgccgatgcactccaaggatcaggacaagcactggttttaggggttcaagtcttagatatgggggtatttttagggatcatcttagggatcatcgttgcattgatccacaaccgtttcatcgacactaccttcaataatgcttttcaagtctatggcggggctcgctttgtcttcattgttttgattccagttgttgtattgttcgccatcctttcttcgatcgtatggccggtgattcaaacggggattgatggattaggcggcattattcaagaaacaggaaacttcggtatcttcttatacgggacgctagaaagattattgattccaactggactccatcatttgatctatacaccatttctatatacttcccttggaggcgtcgctgaagttgggggccaagtcttcgaaggggctcggaacatttactttgcagaaattgcggatccggcagtaaaggttctctcgcaaagtgtcatctgggatgcacgaggaatttcaaaaatgtttggcttacttggtgcctgtctagctatgtatcagaccgcaaaaccagagaatagagtcaaggtcaaagctattttgatcccagcagtggtgacttcctttattgctggggtaacggaaccgatcgaattttcgtttatgttcgttgcaccagttttgttcgtgatccattccgcattaagtggactgagtatggttgcattgaatatttttggctcaagagcgattggtccgaatggctttattgatttccttttgtataacttgccgttagggattgaaaagactcgctggcccatctatatcgccgttggcatagtatttttctttctctattatgctcttttccgctttttgattaccaaaatgaatttgaaaacagtcggtcgggaagatgaagggaatgaaacaaaattgtattcaaaaaaagagtacaaagagaaacggttagcaggagctggtgttggagtgacggcagaagtaatcccttcatctgtaccaacggactcgatttcagcattgatcacgaaaggtttaggtggagacagtaatattaaaacgattgacaactgttacacacgattgcgtttgaaactaaaaaatccagaactagtggatgagacattgctaaaagaagaaacccaagccaaaggcgttatcaagaatggtgagaatgtccatgttgtttatggattgactgtaccaaaagtacgagaagaattagaaaagtttcttggacgagaaggagagattgaatgatgaagaatttttcagtagtgattgccggtggaggaagtaccttcacaccagggatcgtgatgatgctgttagataatcaaaaccgcttcccattgagaaagctgacactttatgataatgatgaagcgcgacaaagaactttaggtgaagcattgacgatcttattaaaagaacaggcaccacagatcgaattttcttatacgacggatccgcaagcagcttttactggtgctgatttttgtatggctcatattcgagtaggcaaatatgacatgcgggaaaaagacgagaaggttcctctacgccatggtgtgttcggtcaagagacttgcggacctggcggtatcgcttatggtatgcgcagtatcaccggaatgttggaaatcattgattatatggaaacgtattcgccagattgctggatgttaaattattcgaatccggcagcgattgtagcagaagcctgtcgtgtgttgcgacctgacgcaaaagtgttgaatatttgcgatatgccagtgggcaccttgcgacggatgtcgcaaattattgataaaaatccagcagacttagaagttcgttattttggcttgaatcattttggctggtggaccagcatcaaggacaaagaaggcaacgaatacatccaacaaatcagggaatatgttgcacagaatggctatctcactcaagttgaagtggacacccaacatacagatcctagttggcaagaaacccacaaaaaagccaaagatcttttggctctgacaccagagtatttgccaaatacgtatttaaaatattacttatacccagattacgtttatgatcatatgaaagagcatcccgaatatacgcgttcgaatgaggtcatggaaggaagagaaaagcgagtcttcgaccatgcgaaaaaaatcatcgaacaaggatcggcagagggtatcgcatttgaaatcgatgctcatgcaacctttattgtggatctggcacgagcaattgcgttcaatacgcatgaacgaatggtcatgattgttgagaataacggggcaatcgctaactttcctgatgatgccatggtggaagttccttgtatcgttggctctgatggaccagaagctttggcacaaggcaagataccatctttccaacaagccttgatgttccaacaagtcactgtggaaaaattagtggtggaggcatatgtggaaaagagttaccaaaaaatgtggcaggcgttaaccctttccaaaaccattcctagcgcaaaagtagccaaagatctcttagatgatctggtctcagaaaatggtgattattggccgggactccactaaaatgtttcacatgctgagaaacatttctgatcaaaagatgtcactttgaaaaaccttacaacaattagtgttcgctaaaaagtctgaggatgacagaggagatagaggatctgaatgataaacgagagggagtgcatctgtggtgcagtagttgatggctgcaagctggatgtttgccaaccctcttgtcaatcattcggatttttttgctggaatcactgacattctaaatgtttatcaagaattcaaagggagatgagcaatggtctttttgtggggatcttttttaagtatgctaaaatagaaatgaattagcagagataagggagcgagaggaatgtttttagggattgatattggaacgacggcaataaaaatcggtttgttggaagaacggaaaatcatttatcaacgttcttttcctatttataccaaaacagaaaaaggtcgcacacagtctgcgtcagaaatcatagctgtacttttgaaagggatcacggcgattccctcctctttacgagagcaaataacagtgattgggttcagtacagcgatgcatagtctaatgccagtgataaatgagaaatttgaagaaatctatatttggtcagataatcaggctagccaagtgattgcagagtttcgtcaatcctcattgtcagaatcgttttatcggcagactgggacaccgatccatgcgatgtcgccatttgctaagttgcttcacttcaaatccgctggcggttttgatggcaagacaaaatggtatgggctgaaagaattggtgatgcttttatttaccggagctccttggatcgaccgaagtactgcatcggcaacaggcctctactcccttgaagaaaaaaattggagtcaagagattcttcactatttggacctttccattgaacagtttgcgccaatctgtgacacgaccgatcggtttcctattgctgcgtccgctgccgctcgctatggattgaatgaaacagtagagatcatgtgcggcgccagtgatggctgtttggcggcttatgcagggtatgtatcgactggaatcaaaaatagtttgacgatcggcactagtgctgctgttcgaaaggtgacggatcaaccggtgttcgatcagcggcaaaatttttgttattaccttaaagaaggtcaatatgtcattggtgctccgtcgaataatggggggtgcgtccttgcttggatcaaagaaacattggcacaagatcctgacactttctatgaaagcctcccaagaatcattgaagaaaccataatcggcagccatggtctgcgcttttttccgtttatcaatggggaacgggctccttattggacatctgatatcaaggcgtcttatcatggtttgacgattcaacatactcgggcagatatgattcgtggagcaattgaggggatgttgttgaatattggtgttttaaaagaaatggcagcaattaccgatgaagtgacgatcagcggtggcgttttccaatcgaaagccattgcacaattaacagctgatatcttgggcgtgacatgttatttgtcaccggcaaacgaaccaatttttggtctttatgatctttattttggtcatcgtttggcagcaagagaccacttgcagaccattacgccgaatcaaaaaacgagcgcagcctacgcgtcgctcgctgaacattattttgactagcagaaagggttgcggctgaagtatcagcgagattgaacaacaagattgaacgacctgaaagcaactgaatggcttcatttatcgagtagatgcgaagcgagccagccagatagcaggggtgatcctagatttttttggctattccatatgttgaagccccggactcttttagttgatttcggcagtaaatgcctctacgaggtactccattagcagtaaaagctttccgtaaaaactcgtatattggatgttctgcgtatcatatggtcgttcatcagtgacaccaaaagaaaaatttgctagttgatgggctcggtgttcaccattgccgcagaaaaggacagtggggatttgatgatcattcgctagttgcattttttctagcactttctgtgtctcccccgatttagaaatcgtgatcagcatactgatgttgtcgatattattactaatgataccgccggaatcagaagcactcaccagtaaagttttaataccattaaccaacatttttttatgaaggtattctgctatgataccagaaaagccagtggcataaatggtaatgaatttatcattgttttgagcataaatttctttgatcgcatcaatagaggctgcaatgccttctgtgttgatctgatagttaatggctgcttcagtggtcatttgacgattcagccgattttttaagaaataaagtaattccaaatagccggaaaaacctaatttttgtgctaatcgcaccagtgttgctggagaagtataaagctcttgcgcgatttttcgcaaagggacgccttcgattttgtccgtatgagacaccaaataagtgaggatgtgctgctcgctttcggaaatttttttcctttggtcaatacatttaagtccatgctattgctccttttcgtggtaatatcatcatacaatgaagagaaacagaaagtaaaacttttttctttatcctttttttaaacaaccttcttacaccgtcttcgcaagagaagatggataagtttggttgtttatttcattataagagattataatttcttatatagaaaaaacaaaggtggaatacaaatgacgaaaccctatgggactgttttgattaaagccgcgaaaatcatggattatcttgcggaagaacccaacaaatcgttgcaagagattgcagctgctacagacttaaccaattcaaccgcgttaaagattctcgaaacattacagctgatcggctatgttgcaaaggacaagcaaaaagaataccgcttaggatctaaactcgtcaaatatgccaataaaaatattcaagaacttgacttggtagagatcagcctgccatttttggaagaattgcaggaaaaagccgatgagacgatccatttgggggttttgacagcgaatgaaatcttgtatgtcaataaactggaacctcaaaatcaaaccattcgcatgtcgtcgaaggtgggaatttcaagacctttatatagctcagcgatggggaaagctgtattagcagaattcgatgagacaagctatgaagcttatttagatgaaacacctttacaaccttatactgagaacaccatcacgaatgttcttaaattaaatcaagagttaagagaagtgcgtcagctgaagatcgcttttgatgatgaagaaatggagaaagagattttttgtatcggcgcggctcttttgaaagatgaggaaattgtcggtgctttctcagtcagtctgccaaaataccgattgaccgagagctataaacaaacattgcttcaagaaatacgtgccacaaaagataaaatcgaagcagccatttgaaatacttttggaaaccccttgcaaaagaaaaaagaccaggtataataaagataagatttctttataataaaacttaatttccaaataggaaattaagaacggaggggtttatgaaaaaagtagagcgattatcaaagttaaaagcctgtggaatcgttgcagtcgttcgaggcaccacaaggcaagaagcgctggaagctagtcgtgccatcgtccgaggcggtattaaaggaattgaattgaccttcacggttccgcaagctgctgaagtgattgcagagttagtcaatgactatcaagaggaccaagaagtgatcataggagctggcacggtacttgacgcagtgactgcccgcttagcgattatggctggcgcagaatatatcgtcagtccgacatttgatcgcgatacagctgagatttgtaatttgtatcaagtaccttatttgccaggctgtatgacgatcactgaaatgaaagaagccttgaaatcaggcgcagacatcatcaagctgtttccaggaagtgcctatggtcctagtatcatttccgctttcaaagcaccattgccccaattgaatattatgcctactggcggagtcagcttggaaaatatgtctgagtggttcaatgccggagtggtcgctgttggtgtcggtggtaatttgttagcgccagctgctagtggtgatttcgagaaagtgacagcggttgcttcacaatatgtggccaagttaaatgacattcgaggtaactgagatgactagaattattaccttaggcgagattatgttgcgcttatcgactagttctggtgtacgcttggagcaaagcggacgttttgctgcacactatggcggtggtgaagcaaatgttgctatctctttagctaactatgggcacgacgtctcttttgcaagtaaagtcccggcaaatgatctcggaaaagctgttacccatcatttacgcaattacggagtggattgcagtctgcttctaagcggtggtccccggctgggaacttactatatggaatctggagtaggagaacgtgcagcaaaagtcatttatgaccgtgcagggtcaagttttgcggaaatcaagaccaatgaatggtcagaagcgatctttaaagatgtcgcacttttccatgtatccggcattacaccagcgttatccgagacgtggcgggatttgaccctttcacttgttaagcgtgcgaaaaaagcaggttgcaaaatcagtttcgatatcaattatcgtggcaaactgtggacgacaaatgaagccgccgcctttctaaaggaaatccttcctttggtcgattattgttcggcgggcaagttggatgcacaagtttttatggagattccagcctatacagggcaaggaaatgagttgctgtattattaccaacaaatgaaccagcgttatccgaatattgaactgttttattcgacaaaacgagaagtgctttccgccagtgctaatacattgatgggtactctttggcataacggccaatatgcagcttctcaagaacaccgcatcgatcctattgttgatcgagtaggcggaggggatgctttttgtgcaggcgtcctgcatggcattctaagtgggtattcctctcaggaaaccattgactttgctaccgcagcatctgcattaaagcacacgattcatggagattgtaatcaatttacagaagcggaagtagctgaatttttagcagccggatctggaaaaatcattcgctaggaggaaccagcatgcaagaaatggaaacccgttatacacacagcccagaagatattcgacactatagtaccgaacaattacgcaatgaatttttggtagagaaaatttttgtacccggaacgatccagttgacttatacccataatgatcgcatgatctttggcggagtaacgcctacggatcaaccattagagtttcaattgagcaaagagttaggcgtagaatactttttggaacgccgtgaactaggtgtgatcaatattggcggtgcgggaaccattgaaattgacggcaccaaagaagacatgaaaaagcaagacggatactatatcggaaaagaaacgaaacatgtagtcttttcttcaaaagatccaaatgatccggcgaaattctatgtatccagtgtaccggcacatcataaatacccgaatgtaaaaatcagtatcgatcaggtcaaaccaatggaaacaggtgaaggcttaacgctgaatgaacggaagatttatcagtatattcatccgaatgtgtgtgaaagttgccagttgcaaatggggtatacgattttagaaccaggtagcgcttggaatacgatgccttgtcatacccatgaacgccgtatggaagcctatgtttattttgattttgccaatgaggacacaaaagttttccatatgatgggtaaaccagatgaaaccaaacatttagtagtcgcagaagagcaagcagtcatttccccaagttggtcgatccattctggagtcggaacaagcaactattcctttatttgggcaatgtgcggggagaacatcacatacacagatatggacatggttcccatggatgagttgaaataataaaagaaagaaggatgaagatggatttttcaatggatcactttcgtttagatggcaagattgcattagttaccggcgcagtttatgggattggctttacgatcgcccaatctttggcagcagctggtgcaacgatcgtctttaataatttaacacaagaatcagtcgatgaaggcataaaaaattatcaagcagccggcatcaaagcccatggctatgtctgtgatgtcaccgatgaagcagcagtcaatgaaatggtcaaaaccatagaggaagaagtaggtgtcattgatatcttagtcaacaatgcagggatcatcaaacggatcccaatgttggagatgtcagccgctgatttccgtcaggtagttgatgttgatttgaatgcgccattcatcgtttctaaagccgttttgccttccatgatcaaaaaaggacatggcaaaattatcaatatttgttctatgatgagtgaacttggccgcgaaaccgttgctggttatgcagctgctaaaggtgggcttaaaatgctaaccaaaaacatttgttctgagtttggtgaagcaaacattcagtgtaacggcattggccctggttatatcgcgacaccgcaaactgcaccattaagagagatccaaccagatggatctcgtcatccctttgatcagttcattgtggcaaaaacgccagcagcgcgttggggagagcccgtagacttagccggtcctgctgtcttcttggcttctgacgcttccaattttgtcaacggacatgttctctatgtggatggtggtattttggcttatattggcaaacagcctgagtaatcctcctaagttcctgatttctaaaacaggcgaacttagcaatcaaaaaagctcctattcttcgcacatcctcaatggattttgcaaagagtagggggtttctttgtcgaattttccgataaaaaaatgaatgggagaacctcttctctgagaaggcggatcgtggttctagccaagttcgatcaagaagaagggggggagccgcttactaaagaaccaacagttagttttcttgcagctttgctctagtttttttctttatttgataaattttttagactattcaattgtcagtggatatgagtaaatagattaggggttctatcgattttccactaaatcaattgataggaggattaagatgaaaaaatggtttctagtagcaatgctatttatttgtagtgtctttgttagtacgcaaaaggcagctgcccaaacggagggctcgatcacagattcctcttattatcgcaacgctttaaccgagaagattcctgcagatcatgcttttattatgagaaatggtgaatcaaccacgatagaaaaagtgtctggagtcgtgaatagtgtagtgaccccaaaaagttagacttttatggagtggagaaatccactccttttttgtatgataagattaactgttagacagctgtttttacagcttctcgaaactgaaccggacttcgccaatttaatttctttttgatgcgtttatggttgtaataatagatatattggtcaatttttgttttcaattcatctaaactccgatagacttctccgtgaaaaatctcttgctttaataaaccaaagaagttttccataggtgagttatctaaacaattccctttacgagacatactctggaagattttatgctgcttcaatttattcttataagcattcatttgataggcccatccttgatctgaatggaaggttctacgaaatggacaatcatttgtcatctggattgcttcttctaatccttccattatggctagtgcgtttggtttttcagaaatccgataagatagaatttcactattgtagaaatccatgaaaggatctaaatacagctttttctgacgaacgacacctgtggtgtctacttcataatacttaaactctgtggtatcagttgtaattttttggtgacagatatttgtataaaaccgacgatgaatacgatttttggcgacagtgccaaccttcccacgataagaattgtaccgtcgagattttcgagtgtaagactttacttcgatacctagtttttttatcagacgttgaatcttctttttattgacatgaatcccttgattctctaattctttttttagtcgcagacagccgtaatctttatgatctttgcgaatttcaagcattttttcttcaatttcttggtctgggtttggtctgtcaaaccgtttctgccaatacatataggttgctttaggaaatttcaatgtttcaagaagctcaactagtttgaatgatcctcggaggctggcgatgattcgtgcgattgattcttgcgtctttgctgggcttcctgttttcgcagcttcctcaactcttttaaaaaggcattctcaatttgaagggatcggacttgcttttctaatgccttgatacgatcgcgttcttcagttgttgtattttcttttttgttttctttttttctagtcaaagtaagtggtcgccctttctcttttgagagcccctcaatacctgcttctctgaaattacgcatccaattggcaataagcgcagggttgttcatttctaaagtgctagcaacttctcgataggacatctcacttgtttgatataactctagcgtatttaacttaaattgaacagaatatttctgattttgatgctttctcaatagaccttcctctccgtattcacgatagacattcacccaattacttacttgagacttgcttgaaataccgtatttgttggcaagataccgatatccgcccacgccactaagatattctttaacgatttttagttttaattcaaaaggatattttgccatacaaataacgacccccaaaagttagattttttggtctaacttttgggggtcgcttcatagtgaaagaatagttactgggattaattctgtaaaagagagcgctgctctgataagaaatgttgggtattatcaagggcaaccggtcaatgtcaaggtgactgtcaagatgttggaaccttcaggtgcggatatgcttatcacgaaaaacgaatttctaagattgaaaatatgggcaaatggtacatcagaaatcacctatgaatttttagacgataagatgcagccaattcaactaaagacgacttttaatgaaatgggtttgaacaaatggaaagacatacgaattcctcaggctgctactgccatagaacatatctttgctgctcccgattccacgatccaatacagcgaagacgagcaaggcactttgacgttaaaaggacaaggaaacgcagataattggtcagatgatgcttgtaaactggcaatcacaacaaaatctatcactagccactcagaacatcgaaaacaatgaagtgatcactcgtttccaacaaacagttccttacactgaaacaaacaattctcgaacaactttatcttacagaatcgaaaatccagatcaaaatcagtttcaattaaaaggagtcgagatcaaagatttttctggaacggatcgaacaaattggtttgaccagaccatcgatgatgaggggaatttgcttgttcatgcaaaagcttctacactaaaaaaccgggccttttatgacaatagttatcagtttatcattcaccacaccttcactggaagtgcagaacaaccggtcgatcctgcactgatcgagaatgactgttttcaacttcaaccaattctttatgaagatattggtgatggtgaacagttaatcggaaaactttctgcgtccatttactactataacgaagtgaagatcaaatttgttgatgaaaaaaatcaaccgctcttagattcgggggaaatcagagggctgatcacccattctgttgatttatcttcgttctatcccaccattactgggtactatccgatccgagaagaaaaagaccacatcattgtcatgccaggttctcaagaagttttccatcgttacaaaaaaggtgtcccactactctttacattaaaagaccgacaacaaagaatcgtgattccacgcttttctaaagaagtcaagttatcttatgacctttcccatgacagccatcaaagcgtccaagttgttgcccaatatggagagaaaaaacaggtgctaagaaactatgatgtgggaaatacacaaacggaagactcggtcgttttcgaagtaccagaagaatggcttaataaagaggtaaaattatatctagagaataaagagggggatcaatcagcagcagaaactcgcgtgtttgttcctgagtcaggaccaaggctgcaagtgccggcagtcttatcttttggaacacaccctattccagcttttaatcagtatctttttgctgaaagtcaaccaatcaaagtggaagataacagtcgcttagaaaaaagcaaatggacagtgaaagtaaaaatcgatacgccgcttaaaaacagtcagcaacaagagctgcgagatgcgctgatttttgttgataaaacaggggatattctcttgtcggacaaagcacagccggtctgggaaggcagtggatccgccacattagctgagaatcgattgaagctgttattgcgaccaacggatcatgtcggggagtatcacggctcgctggtttggatgtttgaagatgcgcctcagtaaaaaaattttctatccgtaaagttcaaccttttttcataataaaacaaagtaagaaacaagcccttaattcactaaggctgcgacatccacatagctgaaataaacaagcaacgtgtttttctccctttggaaacacgttgcttgttgttgattggtaaacaaagaattctaaccgaattacagcaatatctcactgctgagagaaagattcgcttctttgattgcttgacaaatcaagcgagcaacgattaaagccccttgatcattcaagtgagtattgtcactgataccttcgggataattcggatattcgttttttgaaagatgcaaaaaaaactggcgagcttgcctagttgcaaatgtggaaaaatagttttgcgtcatcgtgaatatatccagacaaggaatctcaaaggcagcagtaaaatctctcatagcttctggataaggtcacgcggctaggggattcaagtcattatgctgatggaacttcaagcgagtgatagaagtcagtaaaactggatttgcttgcttttttgtgcaacagcaataaactgtgctaaattttcttgatgttcttttggcgtcgttcctcgttcaggatctgttttctggtcgttgtggccaaaccgaatcaagaaatagtctccgggtataagctgctcgtcggctgctaagaggcgtttttcttgaatgaagcttttggttgaacgtccattcatagctaaattaatgaccgtaacctctggggagaggaaggttggtatttttctttccagccagtttccggacccttgtcagtcattttagttgcagcagttgaatcaccggcaataattagtttaaccatcatccacctctaaaaatcaaaataatccgctgcattttggtaacagataccttcaacaaattcttttaactgtctggtatcacttggtgcttcgccgcgaagaatgagttctcccaaccattcacaaaaaactcttcggaaatattcatgtctggtatacgaaagaaaactacgggaatcagtcagcataccaacaaaatttgctaacacgctaccatctgcaaacttcgtcaattgctgacgcatgccggcacgggtatcgttgtaccaccagccagaaccgagttgaagtttgttgttgccttctttttgataacagcccatcagcgctaccagcacatcataatcatttggattcaatgaatacaaaatcgtttgcggaagagcctctttcctctccgcagcatccagtaatgcttgaagtgggctagtgatcggctgatcgttgatgccgtcataacctgtgtcaggtcccaattgattgagcatattcgtgttgcagtttctataagcatgaagatgcagttgcattgtccagccatggttgtgatattgttcaaataaatgaagcaagagggcagagcgatagactgctgcttctgcttctgtaatgacttcctgatttctcgctttttcaaagatagcttgaggagacacgctgttttctaggaaatgcaagtgatccaatgcgtgatcggataaacgacaattcatttggtgaaaaaaagtaattcggcagtcaagtgctgttaacaagtcttcatagctatcgatcctgtggccaacaactgttgctaattgatcgatatagtggttaaacccactttgttggatatttaaggctttatcaggacgaaaggttggtaatacccgaaagcggctttcttcattagccaatttgcgatgaaatgctagtgaatctgtcggatcatcggtagtacaaatgagttgcacattgctgttggcgatgatttctcttctgctaaaggtctttgattgcaatttttggttgacgatttgccagatttctggcgcgttttcttcattaatcataagatcgacaccaaagaaacgttttaactccaagtgggtccagacgtaaagggggttgccgataattttaggaactgtctggcaccaagcaataaatttgtcataatccgctgcttcgccagtaatcaacgattcatctactccacatgcccgcatcaaccgccatttgtagtggtcaccggccaaccaagcttcggtgatatttcggaaaggatgatcatcataaatctcttggggatctaaatggcagtggtagtcaatgatcggcattttcttggcgtattgatgatacaaatctttggcaaagtcattcgttagtaaaaaatcatcatttaaaaacattggcttcctcttttcttcgtttataaagtgacaccattcttgaagatggcgatttctcgaacattgtttgcttcattacgggttttggtcccactagcgaccgcaatgatcgcttgaataaaatcagcgagaacgtcttccattggttcatataataaccgacctgcattgaaatccatccaatggggtttcttctcgaataattcttggttggtggcaactttcatcgtagggacaaaggcaccaaagggggttcctcgtcctgtcgtaaataagaccaactgacaatcagccgaagcgagagcagaagcagccactaggtcattaccaggtccttcaagaagactgagaccgctttcgcggattttatctccgtatttcaagacgtcgacgaccgcagaggtgccggatttttgcgtgcagcctaaagacttatcttccaatgtggtgattccacccgctttattgcctggagaaggattctcataaacaggttcgccatacgaaagaaaataatctttaaagtcattgatcagatgaagaatcttttcaaaagttgcttggtctttggcacgagacatcaatacttgctcggcaccaaacatttccggtacttccgtcaacacagtgctgccaccttgagaaaccaagaaatctgaaaatgctcctaataacgggttggcagtgataccagaaaatccatctgagccgccgcattttaagccaacttttaattcacttaaaggcacatcttcccgccggtcgtctttggtagcttgcagcaattcgtgcaataatgcttcacccgcttcgatttcatcttggcttttttgagcgactaagaatttgacacgatctgtgtcataatcacctagcttttctttaaattcagcgaccgtattgttctcacatccgagtccgaaaacgagcaccccaccagcatttgggtgttgcacagcatcaatcaaaattttccgggtgttttggtgatcttgccctaattgcgaacacccataaggatgtttgagaatcgtgaccgagtcaaaggttcctaagttgggatgactttgtttgaaattttcgacgatgatctcagcgattccattgatacagcccactgtgggtatgacatacaaatcattacgaatcccgactttgccattttttctccggtagcctttaaaagtcaattggctttttggatacactactggttgtaggttcggctcataggtataagccagcgttcctgaaagattggtcttgacattgtgggtatgtagccactgtccagcttttacatcggacaaaagatgaccaatagggtaaccatacttgatgacgtgatcgcctttattcaaatcaataagtgcgatcttgtgaccttgaggaatctcctctgtaaaactataggatcgcccttcaaatgtaagctgtgtctctttcgtgattgcatgcaaagcaaccgcaacattgtcttttagatgcaatttgagaaaatcgcttttgttttttatttctgtcataatcattccgcctttttttgagtcggctcattttttaatgagtcaacgaggtgtcgagaacccttgtttgaaagtagcactaccatttgtgaaacttctttgttgaacacgctcaagtccactccccataacttttcttgtcctagaataaaactgacttgttcagaagagtcgagggcccgtgccttttcaaagagagctagcacagcttcatcgtcttgacaatcggtcgttaaatacaagtaaatcagtccggctaatgatgcaatgattcttggcggcagtaactgttgctgatgatgacggagcaacaacggcaagagacgtgctttaaattttgagacgctattcaaggcgatcgactgcagttgatgatgaacataaggatttttaaaccgttctttgatctgttccgcatactggatcaattcttcttgcggcaggtctagcataggaatcagttcttcattgaatagctcatcaatgaagcatgtaaaatcaggatcaagcatcacctcttcaaccgttgccaaaccagctagaagggccagagggaccatggctgtatgagggccattcaaaagatgcaccttccgttcacgatagggggtcaggtcttcagtaaagattacattcaaactcgcagctggcaatggaagtttctgagatacagtatgcgatgggttttcgatcacccacaacatgaatggttcggcagtgaccatcaaacggtcctcatacccgtgtaattgattcaactcctctgcttttgattgggggtagccaggaacgattcggtcgactaaactacagcagaaagtgttttcattttctaaccaagtatgaaagctgtcctctagttgccacagtgagcaatattgttggatacacgcttttaatttttctccatttcgatcgatcaactcacagggaatgatcgtgtaacctgatttattcgcttggtaccgttgatagagcagcgcagttaacttagccggaaaactttttggcggcatatctgtccgtttgtcttgaggatcaaaggcaattcctgcttcagttgtattggaaacaatgatgtccaagtcatcaatttcagctagagctaaataatcctgccattgttcatagggattcaatacgcggctaatcgtcgtgatgatctcagaggtttggacaggacggccgtctgctaatccttctaaaattaccgtatacaaatgattctgctgcgccaatagagatcctagaccttgttgaattggttggactactacagcgctaccattgaagagaccttgcttattcatctgctgtagctgccagttaaaaaagcctcgcataaagtttccttcgccgaattgaatcactttttccgacttgcgagtaggatgagtcatttcagttatttttttcattgtaacctccaatattcattgatttataatgaacgtctgccattttgcacacgttaacatttttggcaacagccaaaagcattcaagaagcgaatgctagagggaatctctgattgttagttctgtatctaaaaggtattgtttttgtgaaacagagccgttgattgaatctagaagcagttgtgccccaagctgactcatttcaaaaacgggcttgctaatggttgtcaacgggggattcgtatattttgaaaacgggacattgtcaaatccaataatggcgatatcggcagggattgcaaggccatattcaagacaagtgttgattgcgccaatggccatgtcatcgttggaacagaaaatcacttctggcggctctgcaagttccagtaattgtttggcacattttcgaccgctctcgatagaatagtctccagtgacagcgtattctgttggaaacgctagcccgtgctcagtaagagcccgcatgaaacctgtcttacgctctatactggaacgaaaagttggcttgccttcaatgatcgcaactttcttatagcctaactgaatcgcgtagtcaatggcttgataaacgccttgcgcatcattgcttgtgacatttaaaaatgatggtctatccatttgtcgattgagaacgaccactggcaaatctaagtgactgatttcttcgatgaaagtgtcatcttgatcactttgactcataacgatgatgccatccatccttggcaagtcctcaactggactggtaagggtcgtcatatcgtggaccgctaagcgatactctggcggtagggtggtattgattcccttgatcacttcaaccaaaaagcgatccgatgtacctgccgacaaattagaaaagtaaaggccaataatatacgacttctgattgactagacttttggcattgacattcggcgtataatttaaagaacgcgcaatgtcaccaattttcttttttgtggctggcttgattagtggactgtcatttaacgctcttgaaaccgtggtatgggagacgcctgcgatttttgcaatatctttgatagtgaccatatgtatccctcgactttctcattggttttagcatatatcctaaagagaggaatgtcaatatatcaataatgcacacgttaacttttttctttgaacctgtattcacaagaaattttttatgctagaatggacatatcttaagaaatgattctgtcagtaattacaggagaaatctcatgaaaagggtagggctaatcagaaacattcaacctttttttataacattttccttccagtttctataattagaagcgttttaataatagcgtttggaagtttcatttatcatcgcacgtataaggatattcagaaaacattggtccaaaatcagcaaaatttcgttcagcaagtcaaaggaaatctcgatcaaaaaattcagatcgctttaaaggatttgcacagctgtgcaaaccagccttttaatagaacctttaaagaaggaaggggaaaagaatggaaattagtattgacatcaacgattatttaaatgaaaagtcagtgacagcaacaatccaagggtatatcgatcagcttcatcaggcaggaggagggaggctgatgtttgcctcgggggtgtatccaacaggttcactgatgttaaaaagtaatgttgaactccatctacaaccgggagctgttcttcgattctcggatgatcccaaagagtatccagtggtggtttcgcgttgggaaggggtgaaacgggaagtctatgcttcttgtatctatgccgacggtgccgaaaatattgcaatcacaggttttggcacgatagatggtcaaggtcagaaatggtgggatgtctttcgcaatcatccagagcagttagaatatccgcgaccaaaactgatcagttttgattcctgtcagcaaatcacattgcgagatgttagtttggttaattctcctagctggacagtcaatccaatcttatgccaagacatcactgtggataatattaagatcaaaaatcctgcagactcgccaaatactgatggcattgatccggagtcttgcaaaaatgttcgtatcagcaattgtttgatcgatgtaggggatgattgtattgccattaaatcaggaacagaagagacaaaagaacgcgtttcctgtgaaaatatcacgatcagcaactgtcaaatgctccatggtcatggtggggtcgttttaggaagcgaaatgagcggagatattcgcaatgtgaccatctcaaattgtatattccaagacaccgatcgcggcattcgtttgaaatctcgtagaggacgcggcggggttattgaggatattcgagtgaacaacctaattatggacaatgtgatttgcccatttacgctgaatttgtattatttttgtggtcccaaaggaaaagaaaagtatgtttgggataaaaatccttacccaatctctgaggagactcctcagtttaggagaattcattttgtcaatatctccgcgcgaaatgttcatgctgctgctggttttatttatggtttatctgaacaattcatttcagatatctcgtttcatgaagtagcaatttccatggcaaaagagcccatacccggaaaaccagctatgatgactggaatggaagagatgaccagtcaaggattctatattggctgtgctaaaaatattcattttgaccgtttagaattagtcgatgttgaacatgccttccatatcgagaatagccaggggattgaagttgaccgttcccaagaaaatggtaagcctctcgtgcttcatggtgatttttcgtgaaacagcggcaaacgttgcaaaggtttggatcatttcatagaaaggaaccaatagttcttgtaagaaagttcttttatgagaaaacgattgtctcgaaaagtttttgttagaactcaattaacaagaaccagtgtcggcttatttttgcctatccttatgagaaaaagctagtgccgtttgttcttttcaaccactctcatggaggcagtttttctattggcaaagaagaattacgcagtagcagtcactatttgcagccagaaagttttctagaaacattgatcgctgagggctatgcaggtggagcaatcgatatttgggaatttggtgagagaaaacatggtgaaagtacggtgttttaaaattttcgttcataggacaaaccactctggaccaccatactcaataacaatcaacagttctgaatctacaataatgcgtattgatggatcagaaagtaaatcagatataaaaacggctggcagcctagagggggcttgccagccgttttatatcgtctgtgctttataagaacttattatattagagaagccaactacgccaaaagggtttccgaaaaaacaattatcaagccgaaagtggtaaaataatgcgaatgctgcttaatttcaataaggaaggatttttgaaatggaaattaaatttttgcaaaaagatcaaccaaactggttggcttatgcgggtcaaattgccagcgtcgattggaaagctgctgcatttgtagcaaataagatgcgtcagagaagctataacgactgggaaggcgtttttgtggctgttgcccacaatcaattagctggattttgtacgatcgtcaaagaggatattgtccctcttcaagtcgccccttttattgcgaccgtgtatgttgctcccagctatcgcggcaatcatcttagtcagcaattggtatctgctgcagaacggcgcttgcatcagatcggttttgatacgatctatattgtcactcagctgtcaggtttgtatgaaaaattgggctatcaacaaattgagacagccaccgatcgctttgggagaaggatgcgtgttttggcaaaaaatgaagaattctgctagtcaagcaaatctctttacttactttaagttagtgttattattaaagtaacaagtcatccattcgagatgagaaaaggagcagaaacaatgacggtgattattccagaatttcaacttcatgaacagactcaaattgggaaagttgtcttaaaagtagccaacttagaaaaaatgattgctttttatactcaagtgatcggactatcattgatcgaaaaaaatcagcagactgctcgcttaggtatggcagagaaaatactgcttgaattgatcaaagtcgaaaatccattgcctctcacaaggaaaacaggactgtttcatgtcgctttccttttgccgactcgcaaagatttaggcaatacattgatccattatttgcaaagcaatgcaccgatcgatggcgccagtgatcatggctacagcgaagcattgtacttaacagatcccgaggggaatgggattgaagtgtatcgtgataaaccaaaatctgaatgggatattcgagaagatggcgaaattgttggaattacaaaagaaatggatgcagagggggttgtcgcagcagcagacagccaacaatcaagtttccccacaggtactattgtgggacatgttcatttaaaagttgctgatttagcccagacagaaactttttatacccaagtcgtaggactgagcttaaaaaataattttgggaaccaagcaaaattttttgcggcaggagattatcatcaccatattggctcgaatacttggatgggcaaaggtgtgactcctatggcagacaatgatctaggattggcttattatacctttgtgctcccagacaaagaagcctttgagtcattgctcacgcatcttgagaaggaaaatgtatcccttactcttgaatcaagtaggcgtttggctttattggatccaaatggcatccaagtcaaaatggaatactaggtaaaaatgatagcttttgatgtttttgaatccttgatagcagtttcagtctaaagacggatggggaaagatcggctttatgagatacttggcatatcaaaaaaggagtgcaggaacatgaaatggtggcatctgatgaatacgctatgggtttcattgattttaactagtttgttggtactatttgttcaagacccatttatgactaattatggcatcgatccaatggcgaaatttgcttacttggcattgattggtattcttgcgattggattatatggcgtccaatccgtctggaaacatcaattaatgaaagtatcaatgacaaaaaaataagcggggacccgtcagtgggtccttttttgtttttgaaagtcagtagcggatgtgaagcaaaaaataccttttagatgatagtttgccgggcagcaagttttgtgcacattgatgaggggtgactggcgggtttgacaaaatagatgccagtaaaaagtatcagggctgtgcggattgattccagcacaaccccatgaaaatcaggagatatctatgatctgataagaaaagccattgaccgttaaaaagttgaatacatccttggtagcaaggaagatcgtcttggtatttgtattaggatggaaactcattcgtggttctttagtgatttcgcgctcaaagaaaatctgaatatctcgctccgaattgcttaagagcccaaatatggagacaacgccaggtggcaagtgcatttttttcctcaaaagatcaggagaagctaatttgactcgtgattcactagtgatttctttgagcagatttagatcaagccgtttttgatcgtccattattaggagataataggcggtcttttttttattggttaaaaacatcgattttgttcgaaccccatcaattccagcaataaagctgtctgcttccgcagttgtacttgcaggcgggtgttcgatcacttcaaaggaaatgttcaagtcggtcagtcttgcagcaacagattcaaaaggatccaatatgatcaacccctagtctcttttttattactatatcataggtataagttttaaaatgcctattcaatcgcatgaaagatagagagagtaacaaaaaagcagcttagctgctagtgtaggtcgttaactttagtgatcgaaatctgaaaacagatctgaaaaactttctcataaagaattgaggagcaaagagatttcgtcatgcgcatggatcgagcgtctgtcagtgagcagaagctgctttttacaggctgattctgccattagttgtcaaaataaacccatttgcttgataaagagcaagtaagcgtctcgttaccaaattatttttccaaagattcataagcagaaagttactgagattcttcggctgcaagtttgagactaaatttagagatcacccacagtagaacagcagcaatcagggtaccaacaaatccaaaaaacatgtctaggggatcgggggtattcataacgcctaataccgtttcgcttaataaattggcaatcagcaagaaaatagtcaatccgagagtataggtgaatttgacgcccatcaataaccaaaaataccctagcagaccaatgatcaagctaatagagaaattggaaatgtgtaaataaaagtcggggaaaatcgctgtaaaaaaggttatatctagatattttgataaataggcaaatagtgccaaaaaaatcagtagtaaatagagtaaagatgcccaaacttttgggtaataatgtagctttatttgatttttcaatatgaactcctgtaatcgattgattggctcaaagccgtagctattgtactgggatagttagggattgttaataaaaaacgcagctagtgtgttttttatttgtttatagtcttttgtaacaaaatagttggctgggacattgatgatcggcagatcattttcgttgtcaaacgggacaaatggatcaggtacaaccaaataatccacttggtctttatcgcggaaataattgattgagacatcataatcattggcgaaataattcttaagctcagaataatctgcaaaaaagaacgctggtgacaatgtggtataactgagcccattacttgcagtcaaaacgaaacagatttttttcatcttatttctccttttttatgattttattcgtacgtatatgttaagggggtgatcgatgagaatggtgtaaaaatactaaaggatcaagaaagtgtcctgcacgtatttaccaaacaatgtttaaaccaaaacagctcggttgtctgtgtctttttatagacaagttcattcttttttactggtcaatcgagtgctgttaattagtgagacctgactaacgacggtctaaatgaaaagcaattatttgctgactctagtttcttttttttggtttcttttatcatagagaagtttgagcaactcatagagagccgtgagtactgcaatgcaaaaaagtaaagtcgtatatctgataagaaaaattagattgaaccataatccgtagaccatcggcataaccacgatcaagcaaagatacaattcgatttttcggcgtctcctcaattgcagccatcgttcatcagacatgttctcgctcctttgatcaagatagaatttccatgcaatcctctatgtgtttgactcaacgtatagacaaatagaagaaatacttagaaacagtataaccgaaaatgacaaaaccacataactaggacggcaatttcgtcctagttgtgtctttgtcatagatttataaataacaattgcataaaactaattgaactggaaatacaaaaaaagcaaattaccgaagtaatttgccggtacgatgcagacgatgggatttgaacccacacgagctaagctcacacgcccctcaagcgtgcgtgtctgccgttccaccacgtctgcttattgtttttgtatactgacagctgattgcagccatcacgtctaaaaaacatgttaccgattatcttcacgtttgtcaatgctattttagggatttataaaaggacatttttcttgctttttattgaaaaaaaatatttaagtggcagaatctggtataatgagaaaataactttggagctttaaggagattgataaatgaactactttaaaaatctgctggctaaatcgattcggcagcgccgttttttgtttacgatgatagcagcgttcttgattggtgtggggctcgctttttatcttacattcatggaaccagtgaatgtacaggcagaaatcactatgcaaaaagcgcaagcattacggcttgtagacaattatcagaattatccaaatgaatctcaggacaagcaagaaacctatcaactgctgctggcaaacaacacattatctaatcggcaagcctcgaatctaatcatggaagaatttcctcgtttcaatcggaccagtgaagagattgcaaaaattcagctgcaattatgggaaaccgctttaccagataaagcctttttaccatctatctggcaattgcagcaaaataaagtggtagcagcgcaattagaagaacaggaaaaagctccttttcttactgttgacaatgcgcagactgctgttgcgttgactattcaagtgttattgggatttggctttttattcctggcattttttgctagcgataatttgctggaagaaaagcgccatttttctctgatccattcctatccacaagtcttccctataaggatgatcagtaaagtcggggtaaagatgattggtcatctggcaacgatcagcctgttgcttctaggaatcactgcggccatgtcggtgatcggacgatggggggattggcactatccaacggctatctattatcatcatacttggcatgccgtacctttctggcaatactttctattggtactcgtgcttttgacaactttgattattgtgacagaattactgggccttgtggccaatgttttgattccaaatcgctatgtttctttttttctcctttgtctttgctatggtctcggtacaatagctagtacaccattcagtaaatattccccttttgctgtttttaatttgcaaaagatcctcacaggtgagtttgcagtcagatcgcaatcgacagtcgggttagggacagctttcatccttcttttcttatggggggtgggagcggtcaccttcttgctgatcgcagataagaaaaactggctagcgaaaggagtcatataatgaaaaattattttctctttgaactacagcaattaatcaaaagtaaaaaaacgatcgggctatggtgcttgttagtaatcgttgctggcgtatacagttttcgtgatcgcacctatcggccaattgagcgaatagacaaaaatgaaattgaacagcggtatttgactagacaatcctttttggatgaacaagcagaaaatccctcagatcattggtccgccgccatggcagtagcgatgttcgagccatggaatcaagcagatagcttacgattaacttccctagctgccaatgattggcaaaagtatgccaaagcaacgagccaatggtatcagctgagtctccaatataccgatgatgaaacaattttcttcacgcctgactattatacttatcagaactattatgcggcttatgatgggaaatacggctatgcctccactgcaaaatggatggaaagtgccagccaattaccaaacaaaaagctttccaagtatgtgttggaacaaaaaacgggtatccaatctgttcagcgggcatttacgaattacttgccgtttctctttcttggcgtgacgatctttttggcaatcgatagtctgaccaaagatcgtcgacacaaaagcttattcttatctttgccggtgacggtagatgagattctttgggcgaagacagcggcactgtttattgtgtcaacactgatgatgatcagtacactcgttttgatttggatcggtgtcggctgccaattcggctttggctcattggacctacccgtcagtatcttgtcttcatcctttgatgcccgttatcctatttcttctgccgatgttttttatacacgccctgttggagttttcttacttcagtgtataggggtaggaatcgtgctgcaattgatctatatccgaggcattcttttgctgagcacactttggcgttcagaattagccaatctctttcttgctggttttggcttgattagtccacttatttttcagagacgctggtttagtgcattcttggataaatcaaatgatgcctatttgtatcaaaattatggtcagatcctttcaggattcagccgtttttattttgggtcctctgagtttgtccttgcgaaaggactgctgctttttggtgtagtgtggctgctgatcgagatcggtctttttgttcgtgtacagcagaagcaatttaagcttgtttaggaggtttggaaatgttagcaatgaaaaacgtaactgtgacatttaaacgaaatgttttggatgatttaacgttggcctttcatcctggagaaatcgtcggcttggtggcgccgaacggtactggaaaatcaacactactcaatgtattgatgaattttgttcagccgactagtggggagatctttctcgatcaaacacagctttacacgtccaagaagtcagaaatggcagctcaccagaaaatctcttttttccctgatcagaacgatctatataatgatctcagcggattagaacatttaaaactttatcaacgaatgtggcgatcagaggaagcgctgattgatcaaaccgtgaatcaattaagaatgactgactatatcaagcggccggttggaacctattcgttggggatgcgtcaaagactgtgttttgcgatgcagatcgtgacagacacgccctatatgttgatggacgaagtcatgaatgggttggatccgaccaatgtggaattgatttctaacgttttaaaagggttgcgggagaaaaagaaatcgatcctgattgcttcccatattttgaccaatttggatagttatgcagatcgcgttttgtttttgaaagatggcaagattatccatgaatacctgggaaagaattctttagtagatgaaccaatttatttaaaagcaaaagatccagagtttttggtttcatttcccgaattaacaacattgacaatcgatcttcaagaacaggtctatttaatcgaaatcagtgatcctcagctgccgcaacgctttattgaagctggttttacagaattttcaattggccatctcgcattagctgaacgctatttaaaattctttccagagaatgactgaacaaaaacgaatgaacgtctaggcaataaaagagcgttcattcgtttcttttagaaaagaatttatttaaaagtcgtaaagttctgtcaatttgaccgttttttttctaaactttttgctataataaatgcaatcttttaaaaaagaatatcactagaaccaaggtaatttgcattgattctactgtcaaaggagaattcgaatgagaaaatttgaaaagtcatcaaaactagaaggcgtaagttatgatgtccggggaccagtcctagaagaagcagaacggatgcaagaagaaggcatcagcatcttgaaattgaatacaggtaatccggcaccatttggttttgaagcgccaaatgagatcgtccgtgacttgattatgaatgtgcgggagtctgaaggctactctgattctaaaggaattttttcagcccgcaaagccatcgagcaatattatcaattacaaaagtttccaaatgtgacgatcaatgatatttataccggaaatggtgtatcagaactgatcaccatgtgtatgcaagggctatgtaataatggcgatgaagtgttggtgccgatgcctgattatcctttatggacggcatcgatctctttagctggtggaaaacctgtacactacatttgcgatgaacaatctgactggaacccagatattgaagatattcgttcaaaaatcacaagtaaaacgaaagccatcgtgatcatcaaccctaataatcctacaggtgctgtctatccaaaagaagtattgcagcaaattgttgatgtggcccgcgaccatgacttgattattttttctgacgaaatttatgatcggttagtgatggatgattatgttcacgtcccaatcgctacattagctccggatcgctttgttgtgactcttggtggattgtctaaatcacatcgtgtagccggattccgggttggctggatggtccttagcggggataagagaaacgttaaagattatattgagggcttgaatatgctttcctctatgaggctttgttcaaatgttctttctcagcagatcattcagacggcgttaggtggctatcaaagttcggatgaactgctgcttccaggaggaaggatctatgagcaaagagagtatatttatcaagcattgaatgacattcctggtttatcagctgttaaacctaaagcggcattttatattttccctaagatcgatgtcaaacgcttcaatattaagaatgatgaacagtttgtgttggattttctgcatgagcaccatgtgctattagtgcacgggggcggatttaattggcaagaaccagatcatttccgaatcgtttatttaccgaatatggatgatttgaaagcaacgaccgaaaagatgcgggagtttttagccacttatcagcaaaaataagtaagcaatagtaggaatgaacaatagtaaaaaaaacgaacagttggctccttatcctgtaccttgtagcaaggcatcggaccagatccaactgctcgtttttttgattgatcgaatatcttaaaatcatagcgcttattgcatatgcttagtcagcagtctgctgacatttttttttactgatgatcattcgatcattgaatttttccagcatttcttcgctagggtctgtcacttggacaagaaccgaattttcatattctctttcgacttttcctgcatagaccttgccttcccaagtgaaggtaatggtgctgttaatcgtcatagaaacacctcgttttaaattgttaaaaaataccaagatattgttggaattgctttcctttttgctattatgtgctaaaatgaagaaaattaaaaatgcgaattcgcatttttttaatgttgaaaaagttggaggagagtcatggcaaattcacaagaatcctttggccaaatcattcgcacgttccgcaaaaagcgcaagatgacacaaaagatgttggcagaagatatctgttcacaaagtgttttgagccggatcgaaaataatgaagaattaccgaatgtattggtcatgcatcaaatctgtcaacgattaggcgttaccttagatcaagtaatgatgctccatgctgaagagatcaatcgaacgaatcaagtgttcgctcaaatggaaagccattttgttcataaagagtaccaagagttattgaccaaactgcaggataaaacgatcatggactatctatatttggacgcagacatgcaaatgtactattactttttagggagttgcgaatatttcttgttccaagattatgaagcagcgattgaaagccttaaaaaaggcttatcctactcttatcagcaagataaaatcaatatctctgtgatggagattcgactcttaagttgtatggggcgagtgtataatgatatgcagcaattagaagaagcacgttttcatctagaaaaaagttaccatggggtgcaagtgctgccggcagaacggatgaccacaaccttgaccaaagtattctacaactatgcagtttttttagcgaaacaagaagaattcaccactgctttacaaattctagaagaaggtatcgatcttgccagagaaaagaacagtttctattttttagaagaattatttgaactgaaaggccatgtctttgtcgctcttgacaatcagcaagcagccgatgaaagttttgctctttatcaagcggtcgtcgatattcgaaattcatcgagaaatggtgtagacctttcttgacttcttactcaaataagagtaattttaaggaagaaaagaaataaggagcgatcaagatgaaaacatatatttatgcggacaaattctttttgaagtcagctgttcatggggcaggttatctggagatcattgacggcaaatttggcgatatcgtcaatgaagtaccggaagatgcggaagtaactgattattctgggcaatggatagctccaggactcgtagatacccatatccatgggttcatgaaccacgatgtcatggacaacgatgcagaagggatcaaagctatgtcagaaggcttattgtcttgtggtgtaacttctttcttgccgacgacattgacttccagcaaagaacgtctaagagatgtagcagaaactatcggacaagtgaaagattctgttaccggtgcgaaaatccaagggatttattttgaaggacctttctttactgaagaacacaaaggcgctcaaaatccaatctattttggtgatccagacatcgatacattccacgaatggcaggaagcttctggtgggattatcaaaaaaattgccttagctcctgaacgtaaaggcgttaccgattttgtgtctcaagtgacagaagaaggtgttgtggttgccttaggtcatagtaatgggactttacaggaagctgaagctgctgttgaagcaggagccagtgtttttgttcatgcctataacggaatgagaggactaaatcaccgagaaccagggatggtaggagcattgctatcattaaaagaagtattctctgaattgatctgtgatggacatcatgttcatccgcaagcagctgagatcttgatggaaaaagccgggcatgaccatgttgctttgatcaccgactgtatgatggcaggaggtatgccggatggagattatattcttggagaattccctgttgtcgtaaaagatggaacagctcgtctaaaagaaggaaatttggccggaagtattttgaaattaaaagaagccatcaaaaatgttgttgagtgggagattgctaccccgcaagaagcaatcatgatggcaagtctagtgccagcaatcagttgtaaaatcgatgacaaatgcggcatgatcaagaaaggtcgagcagctgactttatcgtgttggaccctcaaatgaatctgcaagcgacatttttagatggtgtttgccggtacgaagcttaagcagaaaaaagacacagatcgccaattggtgatctgtgcttttttgtaaaaacgtttaattgttttatcgattttcatcaatagctggaaggtagatcaaatttttcttgcccaacaaaagaaaacagcaaaaacgccttcctcacaagctgtcttgatacgtaaaaagctaagtagtgagagggcgtttatttttgttcttgctgcttggagatttcttcttgaacatcttccagcatagttttcaattccgtttctctttccttcaatacaaccaagtcttctttgatttctgcttgtttttctttttcgggaggcctcaagacaaaattgatgaagatcgcaatcagcgtaccaataaaagtgtctaacacgcgatctaatgcaaaaataaaagactctccttgtggaacactaagagtgatcaataacatcgtagcaatcccagaaataataccggaattattattgatcccatccgaaagaacgataatgaaggccactaaagcggggagtaccaataactcgatcaaaaaatcattgtggaaatactgtttcatgaagaagtagatgatggcagtagccccaccgatcgaatttcctaaaactcgtgatttcccaaaagaaagggtcgttgttaaatcttgacgtagtgagaagacagcggaaagggcagcgatcaaaggctgtccgcgattcaaaaatcgaaacagcaagatacacaacatgacagcaattgcggtttttatcgttcgcatccctagacgaaagcggccaaattgcatgatcgatttcctccttttctttaatcataaccaaaataaccgataaattctagtgaaatccttttttgtttagtatactttgaaaggaggtgcagaatgaaaattggaatgagaacagtcaagacagcgattgcttcgggtttatcgatggcagtggctcaagcgattgggttattatatgcgccagccgcagggatcattgcgattttgagcgtaggcaacacaaagaaaacatcgctttatacgggcattggacgcttgatctcactggcactggcgacaattctggcattttgcagtttttcgcttctgggatataatcctttagggtttgtgctctttttgtttttgttcatcccaatggctgtccgtttttcattgacagatggcatcgtggtcaattcagtcttagtaacgcactatttactggaagaatcctttgcttggcgcttgatcgtcaatgaattcttgctcatgattctcggagttggctttgcattagtatttaatctttatatgccagatggagaaaaagaactgaaagaattgcagcaagaaacagaaaagacgtttaaaagacttttaaaagatatgtctgaacacttaaatcaaccttctcgattgaccttgcaagggcaatgtcaatcattattggcaaagattcgacaaggacaagaaaaagcacaggtccatcaagaaaaccaatggagccaaaagaatagttactatgaagcgtattttgcgatgcggcgtgcgcaagttcgtttgttgacagaaatgattggtctcttgcgatccatttgggtagaagaagtttatacagagaaatttcgtgccttgctgctgtataccgcagaaacatttgatgaagctaacgacggcgaagaccttttgctaaggatcgaagagttgtatcaagattatcgacaaaaaccgctgcctagaaatcgcgaggagtttgaaaatcgcgcgcaattgtttcaatttttgcagtcgtttaaacgttttattgaaatcaaagccgaatttgctgaacgggatcattaagaaaaggaaagaatacgactgcccagcgaatcaaatcgctgggcagtcaattgttttattttgtttgcttccaaaattgttgcatctggtctaagacggcaatgacgtcacttgttagatggatcgatcctttagaagttccttcaatagttttaatcatattggcgatttcgtaatttagtgcttgggtcgtatcgcctgtttcaataaactcattggagccatcacgatagtgaatggttgctttatcagctcgcggatattcttcgactgtgatatagccttcttcaaaagcaacgattcctgtttttggcattttagcttggaaagttaggatcacactggccatttcatcagctgggttacgcaaaatcgtcacggattgttcgtcaacgccggtttcaaaaggcttcatgctgctgaattctacctttggtgactcactcatgaaaaagcgggcaaaagagacggcataagtaccaatgtcaagcagtgcaccgccgcctaaatcaggattgaaaaaacgattttgaggatcaggatccttgtaactgccaaaaggtgcttgaatcatttttaattttcctagtttgccagaggctacgatttcttttagacggtgataaagcggcatgttgtagatggtcatcgcctcttctaaaaccaatcctttttctttggctaaggccagttcttcagcaagttcatcgccacttgtagtgatcgctttttcgcaaagaacgtgtttccctgctgccagtgctgccatgatgtagtgatggtggatatcatttggtaccgcaatatagacgatatcgatcgatggatcagccaacattgcttcagcagattcataagcctgaggaatcgagaaacgttccgcaaatgcttggacttttgaataacggcgggcacagacaccgtacaattcgctagcatcgcttgcaaatccagcggcaaattgtgtggcgatgtctccaaggccaattatgccccaacgatattttttcattttctatcagctccttcgtttttagtataacaaaacttagtgaatcttaaaaatattgcaaagccaaagttaaaagttccatttatgtccagctttcagtaaaatagatacaggagggatgtatgatgcataacgtgtctattgcaattattttaagtacagttattgaacaatattctacggaagctcgtttctatgaaacgcagcttggaatcgatcgagaacaatgggaggcctggaaaaatgggacagcgagtttgacacctgctgaaaatcagaaaatcaaattgctgttctctgattatgaatggatgctgattcaaaaaattgttcgtcaaacggtgatctatcctgaaaagagaacaagtgcggtagctgaattcaagaaaatgaagacacagattgcacgcacgtggctttcaaatgatttggcaaaagtggaattattaacacaatctgaagaaagtactcaataccttgatttaagagtcagtattacgtatgatgaatggggctatgacgacattttgaacttccgtctgcctgcttttgtccaacaacaaatcaagaatgagaaaattgagttgttggcatgggtcaaagagaatttagaagaaacatataattaaaggtagggtttttttgaaaaaatatttaggtatcttagctgctgctggctttctattaattagtttggtagctagtctgcagcaggaacattcagcgagcagcgaaacaatcgcaagtagtcagacagtggcgcctagcagtgaaaaagaacaagcaagagtctctcagaagagtaaagattttcccaaagtatctttagatgattgggcgcttgttttagtgggccccctgaataaaggaactgaaatcgatacggggggattagcaaaattaaccaatggctatctcgtggacaaacgaatcgtttctgactatgaaaaattaaaagctgccgcagaaaaagctggtcatcctttagtgatgatctccgcctttcgctccatcgcctcgcaaaaggctgtttttgatcagaatgtcacgatgctgatgagtcaaggacaaaacaaagagaaggcaatcgaaacaaccaaacgaacgatgacagaaccaggttacagtgaacaccatacgggtttagccgtagacgtagttgatcgacaatggtatgattcttatccagaaaccgtattggaccaccgatttggtgagacagatggcggcaagtggctgcaagcgcatgcccgggaatacggctttatcattcgttacccagaaggaaagcaggccattactcagatcgattatgaaccttggcatttacgctatgttggtgtagaaactgctacatatattgaaaaacatcaactgactctggaagaatttctagagcaagtaaaagaacaggaggaagaaaatgagtaaacgacgcaaaacaacgaagactcgactgccgtttgtctttttaggtatcctcctgattgggcttgcttttattttttcaatgaacagtttagccgatcccttgccgaaacaagaggatagtgaagaaatgactcagcaagaatttattgatcgcattgcacctcatgcacaggaattgcaaaagggttacggtattttaccgagcattattttagggcaagccatcttggagtctgattggggcaaaagtacactagctagtgaatacaataatctttttggaatcaaagcatttggacatagtaaaaaagtgacattagatacccaagagttttataatgagcagtgggtaacgatccaaggcgattttcgagtctatgattcgtgggaagagtccatggatgaccacacgatgctctttgtcaatggtgtagactggaatccagcgctctatgtaaatgttttgtcggcaacagactacaaaacagctgccaaagcattgcaagaagctggttatgccacagatccggattatgcagagaaaatcattcgtgtaattgaaacctatcatttaaatcaatacgaccaatagacggaaagaagtgggtgcccatggaagaaaaatacatgccaaagatcacaacggaactgcgaaaagatatcgtgaaagttcctaaagttatcagacaagcaagcgggattcaaatttttggcaaacagatccgctcgatcatttttactacagatattgcaatcatccgcaataccaatgcagatgcggtgattgccgtctatccctttaccccgcaccctgcgattaccaaagcgattatcgaggcagctgatattcccgtattttcgggggtcggaggaggtttgactcaaggatttcgttcttcttatatgagcatgtttgcagaagcgcaaggttccattggtgtggtgctaaatggtccgacaccactgaaaactgtggagcaggtctgtaaggtcattgatattcctgtgatcagtaccgtaactagtaaatataccaaaattgatgaaaaattgaagttaggtgtcaaagtgatcaatatcagtgctgggaaaaaaaccgctgagactgttcgttattttcgcgagcggtatcctgaattgccaatcatcgctactggaggccctacagatgaaagtattttagaaacgatcgaagcaggcgccaatgcaatcacctatacaccaccttccaatggagagttattcagcaaaaaaatgcagcactatcgggaaatggaaaaacctgattagtgagcgttgagaaataaaatgagaacattcttattttggaagagttttctaaacttgcctttttaatcaatcttcggcataatcgaacctatcattcataaaatttaacttgtatatcgtcgtaataaggtcgacagtctctacccgataccgtaaatatcggactataagtaaaaaaagtgccattgatgcaccttttttgctttagcaaaaaaggtgtttttttgttgataggcctaaatggaaaggaaagaggtataggatgaaaaagttgatcgaacggatcgaaaaagacggaaatgttttaggtgatggcgttctgaaagttgatagttttttaacgcaccaagtggatccggaattaatgcaggaaatcggcacgatatttgccaaacgatttcaagcagagcagattactaaagtagtgactatcgaagcttcagggattgcaccagctttatttacggcacaaacattaggtgtgccaatgatttttgcccgtaaagccaaaagtctgacaatggacgaagaattattgacagcctcggtttattcctttaccaagcaagtcacgagtcaagtatcgatttctcggaaatttttgtctgcggaagacaatgtattgatcatcgatgactttttagcaaatggccaagcagcaaaaggattgatcgaattatgccagcaagccggtgcaacggttgctggtatcggaatcgtcattgaaaaatccttccaatctggacgagcattgcttgaagaaatgtcgattcctgttgtttctctcgcgcggatcgcttccttatccgagggtaaagcaactttcttggagggtgacgcttaatgaacgaacaaaatggacgctctgctgtcttagggttgcagcacttgctcgcgatgtatgcgggtgctgtcgcagtaccactattgattggaaccgggttaggatttaatgaagcccaaatgacttatttgatttccattgatatttttatgtgcggggtagcaacattgctgcaattgaccgtcacccgtttcttcgggatcggattgccggttgtcttgggctgtgccatccaagctgtttcaccattgattttgatcggaactaagtcagggatcggtgccatttatggagccattattgcttctggtatttttgttgttttgatctccggtgtcttctcaaaaatcaaagtcttgtttccgccattggttacgggaactgtcattacagtgattggtttgacgttgatccccgttgccattaccaaaatcggtggtggggatgctgccgcagcttcctttggcgcaccagacaatttactcttaggttttgtcacgattgcattaattattggtattcagatttttgccaaaggatttcttcgttcgattgctgttttgatcggtttgatcggcggaactttgctagcaactgtcttagggttagttgatttatccgcgatttctcacgcgcctgtctttcatttgccgcagccgttttactttgggttaccaacctttgatatttggtcgattttattgatgatcattatttcaatcgttagtatggtggagtctacgggggtctattttgcactgggagatattacaggacaacctgtttcatcagaatcattgaaaaaaggttatcgggctgaagggttagcagtgattctgggcggaatcttcaacacattcccttatacgggcttctcacaaaatgtagggctcgtacagttatctggtatcaaaacccgtaaaccgatttatttctctgcggtctttttgattatattaggtttgtttccgaaagttggtgctttggcgcaaatcattcctgaagctgtattgggtggcgggatgttagtcatgttcggcatggtggctgtccaagggatgagaatgttgtcgaaagtcgactattcaaatgacaaaaatttgctgattatcgctgtttcactgggattcggcttaggtttcaacattatgccaactttatttagccgcttacctgaaaccttgcaaatgtttactggtaacggaattgttatgagcagcatgactgcgattatcttgaatcttttattcaatggcttaccaaaaaaagaagcggtcgaatcaggagaatttaacgaagtttgatttacgaaagcattctggtcaacaggatgctttttttgttttagagagaagaaatgatcttttgttaaaagacgaacaatatatctcgtattttttctatagttcgatttttttttgactttatggatgtcacttgctagtatttaagtgaataatcgaagggagttgtcttatggaacaagtagcagtcattatgggcagtacgtcagattgggagacgatgaaacacagttgtgagattttagaggagcttgggattccctatatcaaaaaggttgtttcggctcatcggacaccggacttgatgttttcctttgccgaaaatgcaagagaaaaagggctgaaagtaatcattgctggtgctggcggtgccgctcatctgccaggtatggtcgctgcaaaaacaacgttacccgtgattggcgtacctgttcaatcacgaacattaaatggattggattcgttactttccatcgtacagatgccgggaggcgttcctgtggcaacgacagcgattggaaaagctggtgcaatcaacgcgggactacttgcagctcagatgctttccatgtatgatttaggaatagcggaaaagttggatcaacgaaaaaagacgttgaaagaaaaagtagtggaaagtagtgatcaacttgattaaacctttgatgcccaatgcgacgatcggaatcgttggcggcggacaattggggcgtatgatggcaatgagtgccaaaaaaatgggtttccgtgtcggcgtgctggatccaacagccaattgtccgacagcacaagtagctgactggcatattgttgctgcttatgacgatgtctttgcactggaagaaatggcgcggcgttctgatgtgattacttatgaatttgagaatgtcagcgtagaggctttgaattcgattttgccctatgcaaatattccccagggaactgatctattggcaatcacccaagatcgcttgttagaaaaatctttcttagaagccaataatattgttattgcaccttatgcgacaatcatcagtcctaccgatattcaagatgccatcgagagtatcggctatccttgtgtattgaaaacgactcgaggaggctatgatggcaaagggcaatatgttttatacagcacagctgatttagcgccttcgatgaatcttttgcgggaaggaacttgtgaattagaagcatggatcccttacgaaaaagaactctcgatcatggtggcagggaatggtcgtgaaatcaccactttcccagtggttgaaaatatccaccgcaacaatatcttgcatcaaacgattgcacctgctcgaatcgatgctgaggtagcggaggaagcagaacggatcgcgcgtgtgattgcacaagcccttgatttacgcggtgttttagcgatcgagctgttcttaacgaaaagcggcggactatatgtgaatgagttggcaccacgcccacataattcaggtcattactcgattgaagcttgttctatgagtcagtttgatgcccatgtacgtgggatctgcggttggccgcttgcagaggttaaactgttgagtgatgcggtcatggtgaacatcttaggtgatgaactcattgaaacatatgacctgattgctcataagccagattggcaattccattattatggcaaagaagaagcaaagagcggtcggaaaatgggacacattacgttgttgaccgaagacattactgcttcattggaagaaatctatcaaacgaatatttgggattaaaggagagtaacgcatgttagaacgttatacaagacctgagatgggcaaaatttggacagatcaaaatcgataccaagcatggctagaagtcgaaatcttagctgatgaggcgtgggccgagcttggtgagattcccaaagaagatgtggaaaaaattagagagaaggcaactttcgatatcgaccgtatcttagagattgaagcacagacgcgtcatgatgtggtcgcattcacccgggctgtctctgaatcgcttggtgacgaaagtaagtgggtccactatgggctgacttctactgatgtggtagatacggcttatggttacttgatgaagcaagcgaatgacttaatccgtaaagatctagaaacattcacagctatcattggtgaaaaagcaaaagaacacaaatatactgtcatgatgggacggacccatggggtgcatgccgaaccgacgacatttgggttgaagcttgccttgtggtattctgaaatgaaacgcaatattgaacgtttcgaacgagcggcggctggagttgaagctgggaaaatcagcggcgcagtaggaacatttgccaacattccgccatttgttgaagaatatgtatgtaacaagttggggattcgtcctcaagaaatctctacgcaagtgttgccgcgagatctccatgcagaatattttgcttccatggcactgattgcaacaagcattgaaaaatttgcgacagaaatccgtggattgcaaaaatcagaaacaagagaagttgaagagttttttgctaaagggcaaaaagggtcttccgcaatgccgcacaaacgcaatcctattggttcagaaaatatggcgggattagcacgagtgatccgcggtcatatggtgacggcgtatgaaaatgtttctctttggcatgaacgtgatatctctcactcttctgcagaacggattattatcccggatacaacgattttgattaattatatgctcaatcgttttggaacgatcgtcaaaaatctgactgttttcccagaaaatatgaaacgtaatatgaatgcgacttttggcttgatctatagtcaacgtgttatgttgaaattgatcgatcatggcatgactcgagaacaggcatatgatcttgttcagccgaagacggcacaagcttgggacgaacaacgggattttcgaccattgttagaagctgaccaaaccattatgtctacgttaagtgaaaaagacttggatgatgcatttgattatcatcatcatttaaagcaagtggatacgatttttgcgcgcgtaggtttaggtgaatagggaataaaccccgaaaaaaacaaaaggcacgctgcttcaataagcagcgtgccttttggggtagttttattatttagttatagttttcggaaagataagacaaaagatctggggctaatgctgtagcagaagagttttcttgccgatcttctagcatggacaccatcaaatacttttgattctgggcatggaaagcaaataagaagctattttcctgtcctttctcatcttgtttctccttgatctcagctgttccagttttggcagcaagaggcaaaccgagagctgctagggaatgggctgtcccattctcatcggtaacgacagctttcaaatcctcattgatcagtgaaatcgtctctggtgaaatcaactcttttttcgtctttgtttctgcacccatcactaatcgtggataaaccagagatccttgattggcgaaaacagagtacatcgctgcttgttgaattggattgatcaacaattctccctggccatagccagtgtctgccagcaaaatctcagaattgaaggatttgtcattgctgatttgtgcagggttcatggcaatcggcaagtccaattcttcaccgaaaataaatttctccaaaccagcacggaatttgtcttcacccatcgccaatgtttgttgagccatatagatattatccgaatagacgagagcgttacgcaagttaacggatgcgacatcgctgacccgagtcacgaagtaatctccccaagagctatctttttgccatttcaatccgttgattgaaaggacggtttctggattgatcgttccattgtctaaaccgatggctgctgtgattgttttaaaggttgaaccgggagcataaccagttgcaaagcggctgataaatggtagatctttgttgttatggtaagcatcatagtcctcttgtgaaattccgttggtcattttattgggatcaaaacttggagaactagctagaacgagcagatcccctgtggttggttcagtgaccacggtagaaccagcctgattcttaagggaatcaaaagcgattttctgtgctttggcatcgatcgtgagttgaatcgttttgccgtcagtttttttcgtttcgatcaatgcttttcgctctgtgcctttttcatcggtgatcgctatcttaccaccgttttttcctcgaagttctttgtcaaaagctgcctcgagaccagagcggccaatttttccattgctggctaatgtatcatctttttcaacatcttcagccgtaatgtctcctacataaccaatcaattgtgcagcggcttcacctaatggataggttctgcccgcggtttcttgaatgcttgcaccggttgggagatcagctgtgggttccacgattttcaaaggaacaaagtaatcgtcttgcacccaagattgatccaatgcttgctggatcgctttctcagtcaggtcaaactgcttagcgatcgctttgattcttgactctttatcctctccatctcctaattgtccgggaatcaccccaagctggtacaaggtgccattagcagccagtggtgttttgttgcgatccactatttcacctcgaacagcctcatcaacagaaatacttactttatcttgtccagccatgtcagggaaaatcaggtttggagcccaatcgatttttggctgatctttttcaaatttgatggttccggaataattcagatctttgatttcccccaagctagtagtgagagataactgataggtaaactgataatctgcatctttgacatcatcgcttaaagtgattttggaacccttgatgttggcagcatcaattccgctgaaaattgtttgatatttttctgctacttgatcattggtataaccatttctttctgcgctatcagaaagaatcaaggatggtaatttgtcgaatttgttttttgaaaggttctcaatgaatgagtggacgactttctctgcctgattttgtcgttgctgtttgtcataatagcgatagccgaaaaagccacctactacaagcaataagagcagaggaagaacaatcagtaaagtcttccgtttttttggtggttgattttgagagcggcgattttgtcgttccatttttcttaattcccttcttggttaagtatcggtaactcttcgcgattccgataaagcggcagcagcaagcgataatctgctaacagttgctccatagtgagcgtagaaatctgatctttgagatagactttgccaatctgtaattcgcttttttttacagtagtcagccgctctagagcagcgggccattctcggatcggctgatagccatattgcgtatgatccagagagaggacaaaatcttgaggtagagtttcaaacagtgccggtttctctgaccagcagcgagcgatttgctgttggtttttcggctgatcaatcacacttaaccagacaaaagcatactcacgagtaataccgatctggaagtgggcatccatcttataacctcgcttgtttggtccaaaagctgcccaagtttcttctggaggatagacacttcgccgtcggtgctgtgcgatatgcagataaaaaggagtgtctagcttttctgtgaaaaaagggcagactttttcaccaatttgctgaaaaatcggttggatctctttacgaatttcctgcattcgttcttccaagctcgaagcttggaagacgtgaaagcttttattagtaaataacatagagtagaattcctttcttgtattctaagagatagtatagcaaaaaaacacccttaaaatcgcaatttaggcgttttttaagagtgagtttaactatttataaaattaggttttaaaggagtgaaagtcttttcctcattgagtaagtttagcaagacatccaaaaaggcagtttgcatttcttccatattgaaataaatacggaaacaataggtgtgtttaaagaaagtctgctgatggatttgatggataatcaattcttcgtttaatccgtttttatattggagtacccgttttcgatgttcggaataatgaggccgggcatgttttttgaatggactgaataaataaaaagatgtcatttgatttgcggtcaacacttgttgaacggcaagtagttcattatgtagctgttttctgtcggtgtccgataaatgagcgataaatcgttgcgcttgattttccagtgaccacatgaatcaattcctccttggagataccaatattcacaaaatcaatataacatgaaaaaaaataaatgtaaacgctttatagtgtgtgaacaagtcggaaatctgcagaacaaaaaatgattttaagttaaacacgaacgtttaaagaaaaattagttgttaatgtacattattttgttgacccttattctttgcgttgttagaatagaaaacaacaagaagagactaaaaatctatgtgaaaaaactaacttttgtgaggtgtccggtggtgcaagaacaattgatttacgaagggaaagcaaagaaactcttcaagactagcaaagatgaagagctccgtgtggagtatctcgatcaggctaccgcgttgaatggattgaagaaagatgcagtttcaggaaaaggagcactgaataatcagattaccagtcttatttttcaagaattagaaaagcagggtattccaagtcattttatcaaaatattgtctaaacacgaacaattagtttgtgaagttgaaatgatcccgttggaaatcgtcgtccgtaatacggctgccggcagcttttctaagcgcctgggaattgctgaaggggagcagctgccttttccgattattgaattttattacaaagaagaccgcttagacgatcctttcatcaatgaagatcacattcgttatttgggaatcgccacccctgaggaagttgctcaaatcaaaatgcttgctcgacaaatcaacaccgcattgtgccaactctttgagaaaattaagatccacttggtcgactttaaaattgaagtcggaaaaagtgatgggaaaattcttttagcggatgagatttcgccggatacttgtcgcttatgggatctgacaacgaaagaacatttggataaagatgtctatcgtcgtgaaatcggggatctgattcctgtttatcaagaagtattaaatcgcttagaaaaggagtatagttcatgtatttagtcaaagtttatgtcacttataaagagtcggtcttggatcctcaaggagaagcagtcaaaggagcggttcatcgtttggggtatcaaaatgtctctgaaatacgtattgggaaatattttgagatcaaagttacagacagcaacaaagaatcagtagcggcagaaattgaagaagtttgtgacaagttactggcaaatgtcaatatggagacttatcgttatgaaatcattgagatggaggacaaggaacaatgaaatttgcagtaatcgtttttcctggttcgaattgtgatgtcgatttaatgtatgccatcaaagatgtgatgggcgaagaagccgaatatgtgtggcatgacgagacctcgttagctggctttgatggtgtattgcttccaggaggtttctcctacggggattaccttcgctgcggagccatcgcacgtttctcgaatattatggcagaagtcattcgttttgcagaagaaggaaaaccggtctttggtacgtgcaatggcttccagatcttgacagaagctggcttgctgccaggggttttacgcagaaatgaatcgctgcactttatttgcaagccggtacagttgcaagtcaataaccagacgccttttacctctgaataccagcaagatgaacggatcacgatccctgtcgctcatggagaaggaaattactattgcgacgatcaaacctaccaggaactggaagccaataaccagattgtcttccgttatgtggataacgttaacgggagtttacatggtattgccggcatttgcaacaaggcaggcaatgttttagggatgatgccccatcctgagcgggcaatggaagagttgcttggctcaaaggatggcaagaagttctttgcgtctttattgaaaaatttcgggaaggtgccagtacatgaataaagcaatcatagcagagccaacaccacaggaaatcaaagaaaccaagctttatcaacaatgggggctcactgatgaagaataccaaatgatttcagaagaaatattaggtcgactacctaattatacagaaacgggtctcttttcagtaatgtggagcgaacattgttcctataaaaattccaagccggtcttgcgcaaatttccaaccgaaggcccgcaagttttacaagggccaggcgaaggagcgggaatcgtcgatattggtgatggccaagcagttgtctttaaagcggaaagtcataaccatccttcggccgtggagccttatgaaggcgccgcaaccggcgtcggtgggattattcgtgatattttcagtatgggggcgcggcccatcgcgatcctagattcgttgcgttttggcgaattgacgaatgagcggaccaaataccttttagaagaagtcgtggcaggaatcagcggctatggaaattgtatcggaatccctacagtcggtggtgaagttgccttcgatgcctgttacgaagggaatccattggtcaatgcgatgtgtgtcggtttgatcgaccacaaagatattcaaaaaggacaggccaaaggcgttggtaacataatcatgtatgtgggagcaaaaacaggtagagacgggatccatggtgcaacatttgcttccgaggagttcgtggagggagaagaacagcagcgctcggctgtccaagtaggagaccccttcatggaaaaattgttattagaagcttgtcttgagctgatccttgaacattcagacagtttgatcggtattcaggacatgggggcagccggtctcgtttcttccagttctgaaatggcttcaaaagctggttcaggattaaaactttatttagatgatgtaccgcaacgagaaactggtatgacaccttatgaaatgatgctatcagaatcccaggagcggatgctgatctgtgtgaaacaaggacatgaagcagaagttgaagcgttgtttcaaaaatacggattggaagcggtagtgattggtgaagtaaccgatgatggtgcgtatcgcttgtaccatcagggaaaagaagttgccaatttacctgttgatgctttggcagaagatgcgccaacttatcataaagaaaaagcagaacctgctagaatccaagcatttcgtcaacagcctgattttgaaccagtcattgatgatgcaacagcagtctttttacaattgttgcagcaacccacgattgcttcaaaaaaatcgatttttgaaacctatgattctcaagtgagaaccaataccgttgttggcccaggaagtgacgctgcagtcctgcggatcaaagggaccaacaaagctttagctatgaccacggactgtaatgctcgctacttgtaccttgatcctgaacgaggtggacagattgctgtagcagaagcagctcgcaatattgttgcttctgggggacgaccactagcgatcacagactgtctcaactatggctcgccggataaaccagaaggcttttgggagttatggacatcggcagaagggattgccaaagcttgtgaaattctagaaactcctgttatttcaggtaatgtttcgctgtataatgaaaccaacgggcaggcaatctatccaacaccagtgattggtatggtagggctgattgaaaaggtcgaacatatcaccacacaacatttccagacaccggaggatttgatttatttgattggagaaacgaaggccgactttaacggcagtgaactccaaaaattacaaaatgggtcgatcaatggccgtttgatggcatttgatctattagaagaaaaacagaatcaggcaatcgtcttatctgcgatccaggctggacttgtaaaaagtgcccatgactgtgcagaaggcggattagctgttgtattagctgaatctgcgtttaagaagaatgtcggtatatctgttcaactagatttgccgcaatcttggcttttttcagaaacacaaacgcgatttgtgctgtccattgctccagaaaatcaaaccgcttttgaagctttggcaggtgatagcgcttgtctcatcggaaaagttacagcagaaccgcaactaaaaatccaaggtagcgatggaatgatcgtagtggaaacagccttagcacgtaagaaatgggaggaagcaattccatgtctattgaagtaaaaagcttgaatgaagaatgcggggtttttggtgtctggggtcacccagatgctgcccgagttacttattttggcttgcacagtttacagcatcggggacaagaaggcgctgggatcgtcgcaaatcagcaaggcaagcttgtcggtcatcgagatcttggcttattggcagaagttttttccgatgaacgacttcttcaacgattgacaggtgaagcagcaatcggacatgttcgctatgctactgcaggcaatggcagcgtcgataatatccaaccttttctttttaagttttttgatcagcagattgggttggcgcacaacgggaacttaaccaatgccaagagtttgcggaaatcacttgagtctgaaggagccatttttcattcaaattcagataccgaaattttgatgcatctgattcgccgcagtggtcaagcgaatttgctggatcgcatcaaagaagcgctgaatcaagtgaaaggtggatttgcctatcttttgctgacagaagatgcgatgatcgctgctcttgatccaaatggatttcggccactctcgttaggaaaaatggtcaatggtgcttatgtgattgcttcagagacttgtgctttagaagtgatcggagctgaatttgttcgagatatctgtcctggggaagttgtcattgtggatcaagcgggctaccgtgttgaaacatatacggaagaagtccaaccagcgatttgctcaatggaattcatttattttgcacgaccagattcgaatattgccggcgtcaatgtccatactgcacgaaaaaatatgggacgtaatcttgcccaagaagcaccgatcgaagcagatatggtgatcggtgtaccgaactcatccttatcggccgccagcgggtttgcagaagaatctggcattccttacgaattaggattagtcaaaaatcaatacattgcacgaacatttatccagcccactcaagaattacgggaacaaggcgttcggatgaagctttctgccgtccgcggtgtggttgaaggaaaaaaagtgatcatggtggatgactcgatcgttcgcggcactactagccgacgaatcgttcaattgttaaaagaagccggtgccaaagaagttcacgttcggattgcttcaccgccattaagatatccttgtttttacggaatcgatattcagacgcggaaagaactgatcgctgctcggcaaagtgtcgaagaaattcgccaaacgatcggtgccgattcgttggcttttctcagtgagactggcttgatcgaagcaatcgggttagatttagacgccccctattctggattgtgcatggcctatttcaatggtgattatcctacaccgctttatgattatgaagaaagctatttagcgtcgctcgaataaatggtacaggaggaactcaaagtggcaaatgcttatgcaaaggctggtgttgatgtgaacgccgggtatgaagtcgttgatcgaatcaaaaaacatgtcaaaagaacagaacggttaggtgtaatgggtgccatcggtggctttggcggctgttttgatttgtcaaactatccgctgaaagaaccagtgctggtatccggtactgatggtgtaggaacgaaattattagtagcgatccaacaaaatcaacaccaaacgattggaatcgattgtgttgcgatgtgtgtcaatgatattgtcgctcaaggagcagaaccgatctattttttggattatgtcgcagtgggcaagaatgatcccgaaaaaatcgaacaaattatcgccggggttgcagagggctgcgttcagtcgggagcggctctgataggcggtgaaacagcagaaatgccagggatgtactcggaagaggactatgacttggctggttttgcggtgggaattgttgaaaaatctcgtctgatcacgggagcatcgattgaaccgggacattttctgatcgggctgcctgcttctggtatccattcaaacgggtattcattggttcgcaagatcttttttgaacagcaaggttttcaaatggcagagaagttgccggaattaggcggaaaaactctcggagaagaattgttaacaccaacgagaatctacgtatccgctgtactgccgttacttgaaaaacaattaattgacggtatctcgcatatcacgggtggcggctttatcgagaatattccccggatgttgccgccgcagacaacagcagaaatcacactgggaacgtggccgcaactgccgatttttgaggctctagcttcttatggaaaaatcccggcccatgaaatgtatgagatcttcaatatggggattgggatggttcttgctgttgcaccagagaagaaagaacaagtgctagctttgttaaacgagcagaatgaagcagcttacgttattggtaaagtaacggaggctcaagaacatgcggttcttttacaaggagatccgctatgaggatcgctgtttttgcatcaggaaacggcagtaattttaccgcaattgccgatgcgattagagaagaagaactcaaaggggctacattagcgctgctgttctcagataatcccgccgcatttgtcttggaacgtgctaaagacgcgggggtagcgacattgcagttatccccgcagaaatttccttcgaaagcagcgttcgaagccgcactgttgaacgagttggcggaacattcgattgagctgatcgttttggcaggctatatgcggatcgttggacctacgttgctagccgcttttcccaatagaatcatcaatctgcatccctcattgctgcctagtttttctggaaaatccggtattgccgatgcctttcattatggagtgaaggtgactgggatcaccattcattacgttgacagtggtatcgatacggggccgatcattgcgcaagaagtggtacgtatcgaatcggaagatacattagaaagcttagaagcaaagatccatcatttagagcatcgagtctatccagcggtcatagctgaaatcattcataaaggagaccatcaatcgtgaaaaaaagagcgttgatcagtgtgtcagataaacaagagatcgtatcttttgccaaaaatttagtacaaaacggctacgaaatcatttcgacaggagggacaaaatctgctttggaagcggctggtcttgaaccgattgcgatagaaacggttacaggatttcccgaaatgatggacggacgtgtcaaaacattgcatccaaagatccacggtggtttgctgggtcgccgggacctgcctgaacatttagcagcaatggaaaaacatgacattgcgccgatcgatctggttgttgtcaacctttatccttttaaggaaacgattgcccaagcggatgtgacagaagagcaagccattgagaatatcgatatcggtggaccaagcatgctgcgctccgctgcaaaaaactttgctgcagtgacagtgatcgttgatcctaaagattatcccctcattctagatgaattgacggaaaccggtcagacgcagcttgccacgcgcaaacgcttagcggctaaagtatttcgccatacagcagcttatgacgccttgatcgccgattatttgacaaaagcagttgaagagtctgaaccggagaagttgacactgacgtatgaattgaaacaaacgttgcgctacggagaaaatagccatcaaactgctgctttttatcaagatgcattgccagttccttattcgatcgctagtgcaaaacaacttcacggcaaagaattgtcctacaacaacatcaaagatgcggatgccgctttgcgaatcgcaaaagaatttacggaacccactgcagtcgctcttaaacatatgaatccttgtggtatcggaacagcgacgacgatttttgacgcttttgaacgggcatacgaagcagatccagtttcgatttttggaggaatcatcgtattgaatcgccccgttgatgaagcaacagctgctgcattgcatcaaatatttcttgagatcgtgattgcgcctgcttttgaaccagcggcgctggatattttgacgaagaagaaaaacattcgcttgatgacgttagattttgtagcaaatcctgtcgaaacagaaatggtctctgtattaggtggtttattagttcaagaacaagatacattagcagaatctcctaaggattggacggtcgtaacgaaacgtcagcctagcaagaatgagttggaagcaatggcttttgcttggaaagcggtaaaacatgtcaaatcaaatgccatcgttttagcgaaccaatatcaaacagttggaattggtgctggccaaatgaatcgcgtgggttctgtaaaaatcgccattgaacaagctgctgaagctggaaaattaacggatgcagttttagctagcgatgcgttcttcccaatggatgatagcgtggaatatgctgcaaaacggggaatcaaggcaatcattcaacctggaggcagtattaaagaccaagcgtctatcgaaatggcagatcaatacggagtagcgatgatctttactggcgttcggcattttagacattaaaagacattaaattcaggaggagcagatgaagcttttagttattggtagtggtggtagagaacatgcaatcgccaaaaaattactcgcagatccgatcgtagaaacagtctactgcgcgaaagggaatccgggcatggtcagcgatggcattcaggtagttgctatcccagaaacagaccatcaaagcttgatcgcgtttgcaaaagagatggccatcgattggacctttgtaggccctgaagttcctttgcttaatggcatcgttgatgatttccaagctgcaggattgaacatttttggcccaaataaagcagcggcgatgattgaaggttcgaaggaatttgccaaagaattgatggcaaaatatcagattccaaccgctgaataccagtcttttgtagatagtgaaaaagcgaaagcgtatatccaagaaaaaggtgccccaatcgtaatcaaagcagacggtttagctgctggaaaaggggtcgttgtcgcagcaacagtggatcaggcactggctgcggtagaagaaatgttggaagaacaaaaatttggtcaaagtggtgccaaagttgtgatcgaagattttctggaaggagaagagttttcgctgctggcttttgttcatgaagagcaagtttatcccatggtgattgcgcaagatcataaacgagcgtttgatggggatgaaggaccgaatactggtggaatgggagcttactctcctgttccgcaaattcctcagtcaatgatcgatcaagcaatcgagacggttttgatcccggctgctacaggaatgattgatcaaggaacaccctttacgggtattttatatgcggggctgattgccacagttgaaggacctaaagtgattgaattcaatgctcgttttggagatccagagacgcaagtcgttttgagtcggctaacgagtgggttagctcagattattgatgcattgctcaatggaagacagccggagattacttgggatcagcagttttctgttggtgtggtcgtggcggctgaagggtatccagaaacctatcaacagggaatgatcattccgcaaaaagcggctgaagatgttcaactgttttatgcaggggttgctgaaagagcaggagaattggtggcagcaggcgggcgagtatttttagcggaagggcaaggtgcttctttggaggaagcgcaaaagaaagtttaccaagcgctagcaaaaatgcctttgaacaagatgttttatcgaaaagatattggtgccaaagcattaaagtaaccgcaacttctctttggttccatcgtttaaacaaaagatcgctgatgagagaacagcgatctttttttcttaaaaagaggtagcgttttcaaacggatatgctaaaatagaagagcaaacagaggaggaaaaatacgtgaaaaaaattaaatttggttcaaccgatttagaaatttcaagtgtcattttgggattgatgcgaatcaataatgcaaaagatcctgtagctgtactgacgacagcaatcgagaatggtattactttctttgatcatgcagatatctatggcggtggcgaatgcgaaagtatttttgcagatgcccttgcacaaaccgaatataaaagggaagatcttttcattcaatcgaaatgtggtatcgtcccagggaaaatgttcgatttttcgaaagaacacattattaaatccgttgaaggcagtttgaaacgcttgaaaatggataatcttgacgcgttgctgttgcatcgcccggatacgttagtggagcccgaagaagtcgctgctgctttcgacgagctggaaaaagcgggaaaagttaagtattttggagtcagcaatcaaaatcctggtcaaatcgaattgttgaaaaaatatgtctctcaaccattgctggccaatcaattgcaatttggcatcatgcatactggaatgatcgatcgaggcatccatgtcaatatgacggatagcggcagtgtcgatcatgatggcggaattcttgagtattctcggctgaatgatatgacgatccaagcgtggtcgccataccaatatggattctttgaaggtgtcttcatcggaaatgagaaattcccagaactgaatgcaaaactggaagaattggctgagaagtatcaaacgactgcgacaggaatcgcatctgcttggattctacggcacccagcaaatatgcaggtgatcgcaggcacgatgacgccgcatcgtatcgaagagatcgctaaggcatctacgattgtgttgacacgccaagaatggtatgaagtatatttggcagctggcaatattttaccttaaaaaaagaagaaaccctttatttaatggaaactatctcaggaatgttcgtaaaagacgaacattcctgttgctctttaaaaaaaagattctaaaacacttgtatttatgagtgagctggtttaaattgttgtgggcattaaaaataggcgacagccatttgatgcttgcttcactcttatcaagatttggaggatatttttatgtttgacatgaaagtttttgattacgaagatatacaattaatccctaataaatgtatcgtgaatagccgttcagaatgtgatacgacggttactttaggcaaacattcatttaaaatgccggtcgttcctgcaaatatgcaaacgatcattgatgaatcaatcgcagaatttttagctgaaaatggctatttttatattatgcatcgctttgacgaagcagcccgcattccttttatcaaaaaaatgaaggaaaaaggcctgatctcttcgatcagtgtcggtgtcaaagactatgagtatacttttgtcgaaacattggctgctgaaggactggtgcctgattatattacgatcgatattgcccatggacattccaatgctgtcatcaatatgatccaacatatcaaaaaacatttaccagatgcttttgtgatcgcagggaatgttggcacacctgaagcggtccgagaattggaaaatgccggcgcggatgcaacgaaagtcgggatcggaccagggaaagtttgtatcactaaaatcaaaactggttttggaactggtgggtggcaattagctgcattacgctggtgtgcaaaagcagctcgcaagccgattatcgccgatgggggaatccgcacccatggagatatcgcaaaatctgttcgttttggggcaacgatggtcatgattggttcattgtttgctggacatgaagaatctcccggggaaacaaaagtcgaaaatggtgtcgttttaaaagaatactttggctctgcttctgaattccaaaaaggggaaaagaaaaacgtcgaggggaaaaaaatctggatcccttacaaaggttctttgaaagatactttggttgagatgcagcaagatctacaatcatcgatctcctatgccggtggcaaagacctcgaatcgattcgaaaagttgattatgtgatcgtgaaaaactcgattttcaatggcgatacaatttaagttgcttcggctgtagaattgacagtggcatgaataaaagttcgatccaaaagatttctttggtcttacagcaagcgatagcaaaacattcttatcacttgctgctgagggcaacaagtcttttggtttttttattttcagcgctgaccttctgctttttgtggaatcatctctatcgactatttggtttttcttaatctttcgttataatagaagaaatgatgaaaaaaaactaaaaaaatattctgagctaaaagcggatattcagttgactaagtgagtaagagcaataacaataaagtaaacatgcagaaagaagcaggtgagtgtttgactatcaaagtaatgtccgtttttgggacaagaccggaagccatcaagatggcgcctttggtaaaagaattagaggctgatcctcgatttcaatcaattgtcgtggtgacagcccaacatcgcgagatgttagatcaagtattagaggtttttgcgatcgaacctgattacgacttggatatcatgacattgggacagacgttgaccggcatcactacaaaagtcttgctggaattagaaccgattctccaccaagaaaaaccgtcaattgtgcttgttcatggtgacacaacaacggcatatgccgcagcaaccgcagctttttacgctcagattccgatcggtcatgttgaagctggtttgcggacgtggaataaacgatcaccctatccggaagaagccaaccggcaactcatcgatgtgctagcggatctttactttgctccaacgcttcaaagtaaagaaaatctacttgcggaaaatcatgatccagaagccatctttgtcactggcaataccgcgattgatgccatgcgctacactgtttctcaagactatcagcatcctacactaacagacagaaaacagcgaaagattttgttgacgatgcaccgcagagagaatttaggtcagccgatgaagaatgtttttcaggcattggctcgaatcgcaggcgagtttccagaagtctcagtcgtttttccgatgcataaaaatcccaaagttcgagaaattgcccaagaaactctgggtgctttagagaatgttacattgattgaacctttagatgtcatcgattttcacaattttgccaaccaaagcacattgattctaactgattccggcggtgtccaggaagaagccccttctctcggtgttcctgtattggtgttgcgggacacaactgaacgtccagaaggcattgcggcaggaacgttgaaattggtcggtacaggggaagaggatgtgtatcaagcaacgaagcagttgttgcaggatcacgctgcatataccgcaatggcgcatgctgaaaatccttatggtgatggtaaagcaagtcagcgaatcaaagaagtgttggctcaatattaccgtctgtccggaatggcagatccttcgatccaatgatccaaaaactgaaaatggaattgaaaaataacaaaagtattttcacataatggttgacctatataattagatagactatagtgaggatagaaataaataattgttaggtgaggctcctatatggacacaagctgctgccgcaaaagtatcgagagatgcttagttggtaggacaggtctaatcgtgaaggttaaacccaaagcagctgataacgtcaagttatctacgccctatagtgctaaagctctacaatgatcatgagttttttacgcatgcttattgggagcatgcgtttttttgtgttaatggtcactgatgcctttattttagctgatacatacagacctttatgaggtgctgcaagacaattgctgactgcctttatttttgaccaacacttctgcatgatccagagtttcttgcttgataaacagagaggaagatgaacatggaataccccagtccccagatgaacaataaaaagaatgctaggggtagcaaatgcaactcctagttataggaggaaaagaagatgttaaaaaaattatctaaagatcaagaattaaaattacttgcacaactttcggaaagagagttgctgatggaaatgcggacttcgtttaatggactatcaaaagaggatgcagcagaacgtctggaagaatatggaccaaaccaagtagatgcacaaaaaccaacacctgcttggctgatgtttttaagtgctttcaaagatccttttgtattagttttggctttgctgatggtcatttcttttttcacaggtgattatgaagcagtggtcgtgatgggaatcatgatcttagcaagtgttacgatcacattcgtgcaagaatatcgttcgcaaaaagcaagtttggctttaaaagaattaattgaaaatacatgttctgtcactcgagacggcgaaacgatcgagattccgatggatgaagtcgtaccaggagacatcgtgacattggcaaccggggatatgattccggcagatgctattttgatttggacaaaagatttatttatcaatcaatcttctctgaccggagaatctatgccggtggaaaaatttgtcgatgctgggatcaaagattctaaagaaacgatttccgcattagatatgcaagatttggttttcatgggaacggatgtccttagtggacaaggtaaagcaattattttaaaaaccggtcaaagtactttttttggtgatattgccaaaaatgcaacgtcaaaacgaggaaagactacttttgaggatggtttgacgaaagtcagtaaattgttgctgcgaatggtaatggttttgtttcccatcgtctttttgatcaatggattgacaaaaggagactggggagaagcccttttcttcgcaatcgctgtagctgttggcttgactccggaaatgttgccaatgatcgtcacaagtaatttggcaaaaggtgccatgtcgttagctaaagaaaaagtgatcgtcaaagaattgccttcgattcaaaacttgggcagtatggacgttttatgtacggataaaaccggcacgatcactgaagatcgcgtcgtattagtgcagcatctgaatccgtttggtaaagaagaccaacaagtgttggatatgacctatttgaattcctactatcaaacaggttggaaaaatttgatggatattgcggtattgaactacttcgaagatacagagcgccaagcaccgtatcaagaagtcatcaaagtggatgaaatcccctttgacttttcccgccggcgtttaacagtggttgtcaaagcagatggacaccaaatcatggtcacaaaaggtgctgctgaggaaatggagaaagtctgcaaatacgtggaagtcaacggacaagttctggaattgacagatgaattaagagaaaaacttcgtgaggtaaatcaccgcttgaacaaacagggcatgcgtgtcctaacagtagcaatcaagcgagatgctcacgcagaagccgtctacacagttgaagatgaacaagatatgatcatgatcggattcatgggctttttagacccagcgaaagagtccgcaaaaacagctattgcttcattacatggtcatggtgtcaacgtgaaagttttgactggtgacaatgcgatcgtggcgcaaaaggtgtgtaaagatgtggggatcgaagtgaacgactatcttctagggatagacgttgatcgtctctctgatgaagaattggctgaaaaagcagaagcggtcaatctatttgctaagttgaatcctatgcaaaagtcacgcatcattcagtcgctgcaagccgatggtcatactgtcggatttatgggggatggaatcaatgatgcgcctgcactgcgggctgctgatgtcggtatttctgtagatacggccgcggacattaccaaagacgcaagttcgatcattttattagaaaaaagcttgaatgtgttagataaaggcgtcattgaaggccgtaaagttttcacaaacatgatgaaatacatcaagatgacattgagttcaaactttgggaatgttttttcgattcttgtcgctagtgcattcttgcctttcttgccaatgctttctattcaattgctggtgcaaaatctagtctatgatatggcacagttgactattccttgggataatgtggatgtggaagaactagaaaaaccagtcaagtggcaagtcagaggcttattgaaattcaccgtaagcattggaccagtcagcagtatttttgatatcttgacattcttcgtgatgtggcatgtgttccaagcaaatgccattcaagaacaagcgctgttccaagccggctggttcatgatcggtcttgtgacgcaaacattagtcgtgcatatggtccggacgcgtaaactgccatttttccaaagtatcgcatcgccagcagtcttactgtcaagcgttcttgcgattttggtgggtttcggtattatcttgtcgccgctgcacacagtctttgattttgcagcgctaccatcttcttactggccatggtttgtcggcattattcttgcctacctggtaagcgtagaagtagctaagagaatctatatccattatacaaaagagtggatctgagaaaagaaacggatagtcataaaagattttaacttttatgctatctgtttcttttttattctattctgtattatttttttctcattatcaaaaaaaactaattttactaagtcggaacattcacaagggaaagtcctcgaggtgttacgtttctgtttagttaaaaggcgaagtctgtactattcttaaaagaaaaaaagaatttaataaggagcaaagcaagaaagcgattgcttaaatgtgattgttttcactaatcgtttcttaagagttggtctaatgggaatcgttttattaaaaaaaaataccttttcacttgtcttattctcgtttaaatgataatttataatagtaaatgatttttcgatgatacagattttatccctgttacattcgaaagtgaatttttatatcagagaggaaagtgtgtcaagatggcaaaaaaacaaaaagcacttgatttccaagcaattttggagcaagtcaatgcagattttccaacttatcaagcattagataaagacggaaaaatcgtaaatccagatttagtacctgatctaagtgacgacgaattagtcgagttgatgactcgcatggtatggtcccgtgtattagaccaacgctctactgcgttaaaccgtcaaggtcgtctaggtttcttcgcgccaacagctggtcaagaagcaagtcaattagcaagtcattttgcatttgaaaaagaagatgtgcttttaccgggttaccgtgatgtccctcaattgatccaacacggccttccattgaaagaagcgttcttatggtctcgcggacacgtagctggaaacctttatccagaagacttgcaagctttaccaccacaaatcattatcggtgcgcaatacgtgcaagctgctggtgtagctcttggtctgaaaaagcgcaacaagaaaaatgttgtcttcacttatacaggtgatggcggttcttcacaaggggacttctatgaagcaatcaactttgctggtgcttaccatgcaaacgctgtattctacatccaaaacaacggttttgcgatttcaacacctcgtgaagttcaaagtgctgcgccaacattagctcaaaaagcagctgcagctggtatcccaggaatccaagtggatggtatggatccattagcagtttacactgtctcaaaagcagctcgtgaatgggcagcaaatggcaatggaccagttttgattgaaacattgacttaccgttatggtccacacacattatcaggggatgacccaacgcgttaccgttcaaaagatatggacagcgaatggcaacaaaaagacccattggttcgcttccgtacgtacttgactgaaaaaggactatggtctgaagaaaaagaagaacaaatcattgaacaaactaaagaagaaatcaaagctgcaatcgctgaagctgaccgtgtacctaaacaaaaagtttcagatttcttgaaaaatatgtttgaagtacaacctcaaaacattaaagaacaaattgcaacttacgaagcgaaggagtcgaaatagtcatggcacaaaaaacaatgattcaagcaattacagatgccttagctgttgaaatggaaaacgacaaagaaattttagtctttggtgaagacgtcggtaaaaacggcggggttttccgggcaacagaaggtttacaagaaaaattcggtgaagatcgtgttttcgatacccctcttgctgaatctggtatcggcggtttagcttttggtttagcactagaaggtttccgtccagttccagaaattcaattcttcggattcgtttttgaaacatttgatgaaatcgttggacaaatggcacgtactcgctaccgtatgggcggcacacgcaacttgccaattacgattcgttcaccatttggtggtggtgtgcatacaccagaattgcactcagataacttggaaggattgattgctcaatcaccaggtatccgtgtcgtgattccatcaaacccatacgatgcaaaaggattgttaattgcttctattcgcagcaatgatcctgttgttttcttagaacatatgaaactttaccgttcattccgtgaagaagtgccagaagaagcgtatgaagttccattggataaagcagcggtgactcgtgaaggaacagacgtatcgatcatcacttatggtgcaatggttcgtgaagcaatcaaagcagcggataacttagcaaaagaaaacatcaatgctgaaattatcgatttgcgtacagttgctcctcttgatgtggaaacaatcattaaatctgttgaaaaaacaggtcgtgtggttgttgttcaagaagctcaaaaacaagcaggcgtaggcgctcaagtcgtttctgaaatttctgaacgtgcggttctttcattagaagcaccaattggacgtgtatctgctccagatacaatcttcccattcggtcaagcagaaaatatctggttgccaaatgctaaagatatcgaagacaaagtgaaagaaatcgtgaacttttaatagttgaagaagggaagaatagaaaatggcatttcaatttaaattaccggatatcggtgaagggatcgcagaaggcgaaatcgtaaaatggttcgttaaacccggcgataccatcaatgaagatgacactttattggaagttcaaaatgacaaatcagttgaagaaatcccatctccagtcacaggtactgtaaaaaatatccttgtatcagaaggaacagttgccaatgttggtgatgtattagtagaaatcgatgcacctggccatgaagacaatgaaggagatgcaggtgtggcagcgcaagcccaaactcctgcacaaccagctgctgttccaacaacgggagctgcatctgctggttcttcagaaggcgaaggcgtattccaattcaaattaccagatatcggtgaaggaattgcagaaggcgaaatcgtaaaatggttcgttaaagctggcgacaccatcaatgaagatgatactttattggaagttcaaaacgacaaatcagttgaagaaatcccatctccagtcacaggtactgtaaaaaatatccttgtatcagaaggaacagttgctaatgttggtgatgtattagtagaaatcgatgctccaggacacaacagtgcaccagctgctagttctgcagcgccaactgcagcgccagaaaaagttgaaacttctgactcagcaagtgtcgttgaagctgctgatccaaacaaacgtgtattagcaatgccttctgtccgtcaatttgctcgtgaaaaagatgtcgacatcacacaagtaactgcaactggcaaaggtggccgcgtgacaaaagaagacattgagaacttcctatctggtggcggagcttcagcaactgcagaagcagcagctccagcaaaagaagaagcacaagcaccagcagctgaaagcaaaccagcagcaccagctaaagccttcaagtctaacttgggtgatttagaagaacgtgtagcattaactccaacacgtaaagcaattgcgaaagcaatggtcaacagcaaacatacagcacctcatgtaacattgcatgatgaagtagaagtaacaaatctttgggataatcgtaagaaatttaaagaagttgctgctgccaatggcacaaaacttactttcttgccatatgttgtaaaagcattgactgctacagtcaaaaaattccctatcttgaatgcttcaatcgatgatgcaaaacaagaaattgtgtacaaaaactactacaatatcggtattgctacggatacggatcatgggttatatgtaccaaatgtcaaagatgcagaccgcaaaggaatgtttgctatcgctgatgaaatcaacgaaaaagctaaacttgctcatgacggcaaactttctgcagatgacatgcgcaatggaacgatcactatcagtaacattggttctgtaggtggtggctggttcacaccagtaatcaactaccctgaagtagctatcttgggtgttggtacaatcgcgcaacaaccaatcgtcaatgctgagggcgaaatcgttgtcggccgcgtaatgaaactttcattgagctttgaccaccgaattgttgatggtgcaacagcgcaacaagcaatgaataatatcaaacgtctattagctgatccagagctattaatgatggaaggatgattaacaaatggtagttggagattttgctgttgaattagatacagttgtaatcggtgcgggacctggtggctatgtagctgccatccgcgcagcggaaatgggacaaaaagttgcgatcattgaaagagaatacattggcggtgtttgtttaaacgttggttgtatcccttcaaaagcattgattgcagcaggacatcattaccaagaatcactagattcgacaatgtttggtgtaacaagcgaaaacgtatctcttgattttgctaaaacacaagaatggaaagacaacaaagttgtgaaaacattgacttcaggtgttggcttcctattgaaaaaacacaaagttgaaacaattgaaggggaagctttctttgttgatgatcacacattacgtgtgattcatcctgattcagctcaaacttattctttcaataatgcaatcattgcgacaggttctcgcccaattgaaatccctggtttcaaattcggtggacgtgtgcttgattctactggcggattggcattgaaagaagtgcctaaaaaattcgttgttatcggtggcggtgtcatcggttctgaacttggtgctgcttatgcaaaccttggagcagaagtaacgattcttgaaggttctcctcaaattttgccaacttatgaaaaagatatggttaaattagttgaagaagacttcgctaaaaaaggcgtaacgatcgttactaatgcaatggctaaagaagctgttgataatggcgatagtgtaacggttaaatacgctgttgatggcaaagaagaatcagtgacagctgactatgtgatggttacagttggtcgacgtccgaatacagatgacatgggcttagagcaagccggtgtcgaagttggcgaacgtggattaatcacagttgacaaacaaggccgtacgaacgtatcaaacatctttgcaatcggagatatcgtacctggtgcagcacttgctcataaagcaagttatgaagcaaaaattgctgctgaagccatttctggtaaaaaagttgctgttgattataaagcaatgccagcggttgcctttactgatccagaattagcttctgtcggtatgacgatcaaagatgcaaaagatgctggaattgaagcgaaagcttacaaattcccattctctggaaatggtcgtgcattgtctcttggtaaaacagaaggatttatacgcttagtaacaacagtagaagacaatgtgatcatcggtgcgcaaatcgctggtttaggtgcaagtgatatggtttcagaattggctcttgcaatcgaatcaggtatgaacgcagaagatatcgcgttaacgattcacccacatccatctttaggtgagatcaccatggatgctgctgagttggcattaggcttaccaatccatatttaatgatagaagactcgttcatcctttcgatgagcgagtttttttatgtgatcaagtatcagtgaatggcataaaatactgacggttgcctacttgattgctgtagcaaatctgtctgaattatgctatattaagttgctatctaaaacggatgaaggcggggattgtatgcgtaaacaattgggtgggaaaacgattcgtctctattatacaagtctgcaatttctttattggatgatgttttgttcaatttatggatttgccacattatttctgatttattttaagatcgatccagcaaaaatcggtgggatcttagcacttatcaatattttttcagccgcgcttcagcctttcatcagtcaagtgatcattaaaagaaaaaggattcccttgattgctgtcctaaaagggatgacactgagcctgattatcgctcttctagtagggttattactgccagcactgacgattatcagttttatcattggtgcaatcgtgctagtttccatgcagtcatttatcaatgctcttgcatttgagtatgtgaacactggctatgggattaattttggtttttcgagagcaggcggttcactaggatatgccgcaacctctttcttattagggcagttgttggcgagctattctgctgcgcttctcccaataatggcattagtagaagcaggactgttttttgtcctcttacttttgctgcccacagtgaagacaagggttctgccgttgaagatagaagagaagcattcgggtgggttaggaaaaaaatatccttttttacttttgttatttataggattcagctttctgttcagctttcacacaatgatcaatagcttcttggcacagatttttgcttcgatcggaggcggcagcaaagaaataggaatttcattaatgattgctgcattatgcgagttgccaggaatgatattcttcgaacatttggtcaaaagaaagtccagcaagttttggcttttgttttctagtatcgcatttgcagtcagaggagtaatgatgttgcttatcagcacgattgttatgatggaaatgacacacctattgcagggctttagttttgctttatttatcccagcgtctgcttatctcttcaatcacgtattggcagatgaagatcgggtatttggacaaacgctgatcattattgcgacgacattaggcggtgtgctggggaatatcttaggcggcagccttttacagaacttcggtgtctggcagatgttattgtgcggcacgtgctttgctttgattggagcgttattaacgctatgggggatccgtaagctgccaaaggcctctgctgtttccgatctttccgaatagcagacaaggaatgacaaaaatagctagagcaatgttcaaaaatgataacgaaaaagagtggcgatgattgttcgccactctttttcgttaaagtgaatcagcctagccgggttatttcttttctaaaacagcgatgaattcccgcatataatcgggcaggtcaggtggtctacggcttgaaacgatatgaccgtcggtgataactggtgtatccacccaagtagctccggcgtttgtcatatcgtcttttatgccaggggtgctagtcacttttcttccttgcaatatattcgcggaaatcaagacccagccggcatgacatatttgaccaatgactttttcttctttgtccattgcttgaacaaaagaaatgacttgtgggaatcggcgcagtttatccggtgcccaaccgccagggactaagatggcatcataatcagccacatggatgtcgtcaaaagcaaacgcggattctgcaggaactccgtattttcctttatagcttttatgggcttcttcgccaactaaatccacttgagcgccttcttctcgcaaacggtgaacagggtaccaaagctctaaatcctcgaaatcattgtcgactaacgcgatgatttttttattttctaagcgcaaatgaaatcctcctttattcttgctattcttactgtaacatcaaggaaaaggaaacaccaaaagaatgcttttcaagaaagacgactagcatttatctgtaaagtttagccgcaagggtaaaaaaagcagtcgttaaagaaaatagaagatcaatgaagggatagttctagcagtgtaagcgttgtaacgaataataaattaggtcataatcaaagtaaccaataagtcttagcaagccttaacaagtctgaacagatctgaacaagactgaataggagcgtgaaaatagggaaccttttgaaaaagctagacaatctatttaccagaatgtacgtccattggaacttgcacgctggcagattcattttgaagacggtagtcgggagaatgttttacagatgttagaggtctatcaaaacgaggatggcggctttggtcacggcttagagccagacaattggaaacccaacagcaccccgattgcggcgtgagctgcctgcagtattttatgagagatcaattgccttgatgctaaaaatcctataatacaggggatcttgaggtagttgtccagtgcgaaagatttttctgaagggaaatggcggaaccaagtacctccgactgcttttacccccatgccatctggtgggagagtcctgtaggtgtgccggctaataatcccaccgtgagttttgctggtatgatcatccgcgtggaagctactggtttatctcaacaaacggagggaatccttcaaaccgccattgaagctttctcaatgagacaacgatgataggcatacattagtcgtttaattggaaatactaaactattgtaaaaaaacacatgatcaacctcttttggcgaacataaattttcaagaagtgttgttccaacaaattcgtcaaaccgtctcgaaagacccagaagaatggttcacttcttacaccagcaaaccatcggactttttttctcgaaagaacaaatgctcaccatttttgataaagaactttgtcagcaagaagccgctaaaatctcagagaaccagctagaagatggttctttccctattccatggcaatggggcacagaatatacaaagttttatatcagcgtgaattggtggaaatccgttcagatcatcaagaattttttatttttgcatgctttttcaaaataatttgaagcttctcattgcagtttgatttagaaggcggtactttgaaagtaaaggagggactagtatggtcgatgaaaaaaagaaagatttcaataagatgctccatgagacgaaaggaatgccgaaaatcaagcaaatcatagatgaaaagagtattgagaaatatgggggaaagagaatgcttttggctcctccagtggattacaatcaaatcatggggcgtatcccattaggccaagtgatgacgattagtaagattcgcgagtatctggcagaaaggtatggcgccgatttcacagatccaatcaccgcgggtatttttgtttccatcgcagcatgggctagtgaacaaagaaaaacagataaaattcctttctggcggacattaaaagcgaatggggagttaaatcctaagtatccaggcggaatcgagaaacaaaaaagcgctttggaaaacgagggacatacgatccttattaagggaagaaaaaacctacgctattatgttaaagactttactgaagttctagcacaactatctaaatgaaccaacgtggaatgagttaaggtatctcgtattttagttagagctaggactaagctcgattaagtctgtaaaaggcgatatagcctaggcatcatggggtcttcttcaaaacattcgttcattttttttaaatagggggtgcatctctcattgagagctgttctcttttattttgcgacagagtctctgaccaatttgtatttttatggtacactgaataggacgaataggggtgattaaaatgcgtgattatcaatatcctctagatctggactggtcaacagatgaaatggttattgtaatgaatctatgggatcgcttagaacaagcctacgagaaagggatcccggcagcggagtttttagaagcttatcagcagtttaagaaagttgtgccaagtattggggaagagcgccgtttaggcagagatttcgaagacttgagcggatactcattgtatcgaacggttcaagcggctaagacgacaagcggtaaactgaaaatgaaggagtagaaagcaaccatgcaagaaatcgttagtgaaatccatagctggatgattgcagcaggggaaaaaatcaaagaaaacctaaataaagagtctctgatcgttgaaacaaaatcaggtcggaaagatttggtgactgaactggataaggcgacgcaggattttctaattgagaagattcaagcctttgacccagaagcaaaaattctaggggaagaaaatggtttagatcgactttcagattttagtggacgagtatttatcattgatcctattgacggaaccatgaatttcgtgttggaaaaagagaatttctgtatcatgattgctgtatatgaagaaggccaaggacgttttggctttgtttataatgtcatgaaaaatgaatttctttggggtggtccggaaattggggtcttttgcaacggaaaaaaaatcgatccgccgaaagatatcgctttagaggaaggattgatcggattaaatgcgcccatgttgatgcataatcgtcatcatgaagtcgaaatgagtgaacgggcactaggtgtacggatgaccggttgtgcgggcatcgaattgattgcgctggtcttaggtcagcgcgcaggctatatttccaacctagcgccatgggactatgcccctggcggtatcttaatggaaacattaggtttgaagatggcgaatatcaccggagaggaacttgctctagatggtcgggaattgtttattggtggcacaccaacagcatttcaagaattattgacgatcgcaaatcaataaatgacgagcagatatctacgggtatctgtttttttctgtaaaaatgaaaactttgcactatatttcagaaagaaattctggtataatggcttgtcgagtgcaatgtcaccaaaaaaggagtttataaattgaatattagaaatgatatccgcaacgtcgctattattgcccacgttgaccacggaaaaactacattagttgatgaattattgaaacaatcccaaacgttagatagccatacccaattacaagaacgggcgatggattcaaatgcgatcgagaaagaacgtggtatcacgatcttagcaaaaaatacggccgttgaatacaatggcacaaaaatcaacatcatggataccccaggacacgcggacttcggtggagaagtggaacgaatcatgaaaatggtcgacggtgttgtcttagttgttgatgcgtatgaaggaacgatgccgcaaacacgttttgttttgaaaaaagcgttggaacaacatttagtgccaatcgttgttgtaaacaaaattgataaaccatctgctcgtccagaacacgttgtcgatgaagtgttggaattatttattgaattaggggcagatgacgaccaattagatttcccagtcatttacgcttctgcaatcaacggtacatctagtgcatcagacgatccagctgatcagcaaaaaacgatggcgccattgttcgatacgatcattgaacacattccagcaccaatcgacaacagtgacgaacctttgcaattccaagtatcattgcttgattataatgattatgttggacgtatcggaattggccgtgtcttccgcggatcaatcaaagtcggcgaccaagttgcattgatgaaattaaatggagaagtcaaaaaattccgtgtaacgaaacttttcggtttctttggtttgaaacgtttagagatccaagaagccaaagccggtgatttgatcgcggtttccggaatggaagatatcttcgttggtgaaacagtgacaccaattgatcaccaagattcattacctgtgctgcatattgatgaaccaacattgcaaatgacattcatcgtgaacaattctccttttgctggtcgtgaaggaaaattcgttacagcacgtaaaatcgaagagcgcttgatggctcaattgcaaacagacgtgtcattgcgtgttgatccaattggacctgactcatggatcgtttctggccgtggagaacttcatttgtcgatcttgatcgaaaatatgcgtcgtgaaggctttgaattgcaagtttctcgtccagaagtcattgaacgtgaaattgatggcgtgaaatgtgaaccatttgaacgtgttcaaatcgatacaccggaagaatacatgggatcagtcatcgaatcattgggcatgcgtaaagcagaaatgcaagacatgatcaatacaggaaatggacaagtgcgcatcattttcttggcacctgctcgaggattgatcggttatacgacagaattcttatctatgactcgcggttacggcatcatgcaccacaccttcgatcaatatttgccaatgatccaaggtcaaatcggtggtcgtcatcaaggcgcactggtttctatcgatacaggtaaagcaacgacttactcgatcatgagtattgaagaacggggaactgtttttgttgaaccaggtaccgaagtatacgaaggaatgatcattggtgaaaactctcgtgacaaagacttaaccgttaatatcacgaaagcaaaacaaatgactaacgttcgttcagcaaacaaagaccaaacatccgttatcaagaaacctcgcattctttctttggaagaatcattggaattcttgaacgatgatgaatactgtgaagtaaccccagaaagcattcgtttgagaaaacaaatcttgaacaagagcgaacgggaaaaatcacagaaaaagaaaaacagctgataaataaaacacctaaggaagtctaagacttctcgtgtagatgattttccgaaggatggaaaaggaattgctcttgtggtgcagcggctcttcgccgcagagcctaaaagcaatcagccgattctatccttcggatgttttttgttcaaaatgttggcgaagagccatcatcgaaataaacagcgcttgcaatttcagtgattcctttttaaaatgagaaaagcaagtacaaaggagaaacctatgaaaaattatcctgttaagaagaatcaggaacttgaggtcgatattttagatctttcccatgaaggaaacggcatcgccaaagtcgatggctatttactttttattgaaaacacattacccggcgaacgtgcgttagtcaaagtgttgaaagttggcaacaaattcggttttgccaaagtgatgaaactgttacaaacgagtccagatcgtcaagaactgcctaatgaagatttgttgcgaaccggtatcgcacctttgagtcatttgaagtacgaaaagcaattggcattcaaacaacaacaagtagagaatgttttagcaaaagtcgcgaaaatgccgcaagttgaggtattgcctacgatcggcatggaacaaccttttggctaccgtaacaaagcgcaaattcccgttcaaaaaatcaaagggcagttgactactggtttttaccgcaaaaatagtcataccttggtgccaatcgaagatttctatatccaagatccggcgatcgatcaagcgatcgtaaccgtgcggaacattttgcagcgttttaacgtcaaagcctacaacgaagaagctcacgaaggctttttacgacacgttgtgatccgtcgcggacaccactcaggagaaatgatggtcgttttagtcacacgaaaagcgaagtttttcaaaggagaagagattgctgaagtcattcatgaagagcttcctgaagtagtatcggtgatccaaaatatcaatgaagaaaaaaccaatgtcatcatgggtgatgtagagaaagtcctttatggaaaagcttcgattgatgaccaattgttcgataagacgttccaaatctctgccaaatctttctaccaagtcaatacggcccaaacagaagtgctgtatcaaaaagcgtttgaattagcagatctacagccggatgacattgtcgtggatgcatatgccggaatcggaaccatcggaatcagtttagctgatcgtgtccaagaagttctcggaatggaagttgttgctgaagcggtcgaagatgccaaagcaaatgctgcgagaaatggcttagaaaatgttcattactttgtaggcaaagcggagaagattatgcctcaatggttacgtgaaggcattcagccaactgttgtctttgtcgatccgccaagaaaaggtctagaagctagctttatcgagacaacggctgcggttaagccagagcgcattgtctatatttcttgcaacccagccacactagcacgtgatctagcgctatttgcagaagaaggctatgtgacaaaacaagtccagccagttgatctattcccacaaaccactcatgtggaatgtgtggtcttgttgaccaagtaagattaaacaaatatcagaacgactcagaaaatatcctgagtcgttctttttaagtagatgaacaaaagctagcgattacgagaagaaggcgcattttaatgtaataaactaaacgcgacaacttaatcttgataataagcaataggttgcatataatataggtaacctattacctattgtgaaagggaaatgctgatgaaggccccagaaaatcctagacatctattatttggtggaacatttattctagcgaacaaactccaatttgcaggagacaaatctgtcactggattaaccacgaaacaatggtttttactaatgaatcttagagaactttctaaagtgagtgtacctagtgtcaatgaattagcgagtacgatgaatacatcaagacaaaatattgccaagatgctcgacacaatggaaaaagaaggacttgtatcagttagtcaaagtgcccaagataagcgagtcaaagaagtttttataacaaaaaaaggacaacaattggcaaaacaaagtgaaaaagaaagtcaagattttcgagataaagtttttacaggaataacagacaatgaattggcaattgcttctcaagtcacactaaaaatgatagagaatctggaacgcataatcaaggagatggatcatgatgaaggataacctagcggttgtatacttttctaaacatgggatgacagaaaaatatgccagatggattgcagaagagttgaacgcagcacttatcgacgggaaaaaagtcaaagacgtagaattgcgtaaatattcatttgtcatttttggcggtcctatttatgctgggaaaatcactggtgttgatttactgaaacgaaaccttttcgatcatctggttgtatttacagttggtctgagcgatcccgtcggtacggattatgctgatttagataagagtcttcaaaaattaaaaagcattcccgaaggtatttttcattttcgaggcggaatcgattatacacaattaagcatggcaaataaactgctgttaaaagtgataataaactcgttaaaaaaagtacctgatgctgaacttacttcggaaaacaaagcattgatcgaaacatatggacagacggtcgattttagtgatagaaccgctattgaaccgttggtagcttatgtaagaaagttagttgagaaggaaagttaaactgataaagtcatacacttaatgaggtggatgattcatcttacatatggattgaatggattgttaaagacgtctctgcaaaagagtcgtctttttgttttcaaaggcaaaccaatttaatcaaaattggtaacttctgaagtagatgattgattcattctccattttactttcaaacagggaaatagtaaacttgaggaaaatcaatgcgatagtttttcactcaccgttcaagacattcggttgaaaaaataacaaaaatcctgcaaaacggatgcttatcgggttttcttcgaacaggattgaccagagaaacaaggagagttgctagagacgtgctactaagtttttttacaggaaatccagtttatatttgcttgcagtctaatttaggcagaggagaaggctatggataaactttatttggaagacatagaagagattatcgcacatcgatacgacaatggcgccgattactggacgactgaggaccgaaaattattgaaaggggctccgtttaccacgttagaaagtccaatgtacttacttgaactgggagtgtctccccaggatgcgatcctaacagaaacagcggagctgattttcagcacttggagagaagatggtcgtttcaaaacttccccatctggtgggctgtatccttgccatacggcgttagccctaaggaacctgtgtgttctcggttatgcggaagatcaacggcttcttaagaccttcgactattttatttccacacagcaagaagatcggggttggaaatgcaacaagtatagctttggtcgaggacctgaaacggagcattctacaccgatgacgactttaacgttattagatgcctttcgctatagtccattcggaaagaatcaagcggttatccatcctgcgatcgagtttctgttgacgcattggagactgaaaaagccaatcagtccttgtcattatggcattggcacgctgttcatgcagacggaatatccttttaggggatataatctcttttattatctgtatgttttatccttttacccttatgcgaaacgagatgagcgctttttggaagcgttacaccaatttgaaacaaaattagtagagggcaaagtcattgtagaacgtgttgtgccgaagttaggaaagatgaatttttgtaaaaagggacaggccagtcaattagcaacgaaacgttatcaagaaatattaaccaacttagcatagcatttttggcaattcagcagaacaggaggcaagaaaatgacagaaacttgtttgacacttcgtccattgaccaatgagatcgaactagtcgatcgctggttaagaaaagagtatatcaagaaatggcttggttcggcagaagattggttgacggaaatcagaaatgaaacaggagaatttgattatatccatcattttatcgtccttcttgatgataagcccatcggattctgccaatattacgtgtgtgaaaagaccgttaaagggtacccatgggaacatgagccggctggaacatttggcattgattatttcattggggaagagacgtatctcaaaaaaggatttggaaatatgttgatcaaagcactcgtcatccatatcatgagccatgaacaggctcgtcgaatcattgcagatccagtgccagaaaatcaagtttcaatcgctgtgttggaaaaaatggctttgaattggatgaaggaactgggctttatttcaaagatctttcagaatgaatgttgaaaagcaaggcagttacgaaaactatgctttttatctaagaagtaaataggtgtgttgaagtggactagagacgaaaagaacttttctttaaaagtgttcttggtgcagaaacgaaagtgaacctggtaaaggagtcagaagaatggatcgatatgttgctttattaaggggaatcaatgtcggcgggaaaaataagttgagtatgtctgaattaaaagaagaattaaagaaagacgaatttacagatgttgtcacttatctaaacagtggcaatgttatcttttccagtaacagagaggacccacagattttagccaataaaatgagaacaaggatcaagctcggctttgagttagacattcccattcatgtgattttacaagccgaactaaaagaattattagcaaatgctcctgaatggtggggagatgagaacaaagaaatttatgacaacgtcatatttatgatgaagccattgtcttttgaagttttactgactgagattggtgaaccaaaagcggactttgaaagagtgtatccttataaagacattgtcttttggtcctttattcgcaaagaacatcaaaaaacaaattggtgggcaaagaccgcaaagccaaaggtaaaggatcaactgaccatccgaacagccaatactgtaagaaaaattgttgacatgtgatcaaagaaagtcctgtcaattattggctgattccgctcttaaactcattgtgaaaggtttaggtagtgttctctaattactgggttttattggtcataaattgactttgagtgtcgcttttttcaaagcatggaagaaatcaattgaatgcaaaactattctgaaaattttaattctccgaagaaggagccttgtaatctatttttaatggatttatgcttattcttgaaaggagaatgatgatgaaaaaagcagaattgcatgagttgattacgagtacccagccaaatatttgtcaaattgttgcttacaagaaccacgaagaagtctattcagatgaatggaatcattatcagagaaatgatacttgccatgtaatgtcggcgacaaaaagcgtagtatcgttgttgatcggaatcgccatcgatcagggaaaaatttatagtattgaagataaagtccttgattattttcctgattatagcgtgaaacgaggagaaaaaacgatctatgacgtgaccatcaaacacttactcaccatgcaggcaccttataaaggaaaaggagatccttggacaaaagtctgtactagccaagattggacgaaagcttctttagactttttgggtggaagaaaagggttgacgaatcaatttgattatcgaacagtttgtctgcatattttgactggtttattatgccaagcaacaaaaatgaccacggttgattttgcaaacagctatttatttgaacccatcggcgttagtcgacatcacaattaccatgccgaaacagcagcagaacacaagcagttcactatcggaaaagagccaaaggagccggtttggttttgtgatccattgggtgttggtacagctggttatggtttgtgcttgtcagccagcgatatggcgaaaattggcgaactctgcttgaaccaaggccgacacaaaggaaaacaaattgtctctgctgaatggatcgcagaaatgagtacaccaacgcagccagctctaatccaatttcagcagatgcactatgggtatttatggtggatactagacccaaagcagaatgtctattcagcaattggcaatagcggcaatgtcatttacgttgattcgaaaaacaaactggttattgctgtaaccgcgtatttcaaacctacggtccttgatcgggtcgactttgtagaaacgtatgtgaagccatttgtcctgacagaaatagtctgagcccttcacttattgaagggacgaatggaaaggagcggcgactgcgttccatgagaatcttcttaaaagaacgttgaacgaatgagcatttcttggacagataccaacacaaattaacgataacggaggaactctatggtcaaggcaacgattcgtgccagtattgatcaggatatccaaaagatatggcaaattgtcaccaatcttcaggactattcctggcgaagtgatttaagtaaaattgaggtgatcaatgaaaggcagtttatcgaatacacaaaaagcgggtatcccacaacatttacgattatcgacaaagagcctttcacgttgtattcatttacgatggaaaacacaaatatgcgagggcgttggcaaggaaaattcaccaaatcaggtgctcagacagatatgatctttacggaagaggtaacgctgaagaagttttatttgaaaccatttgctaaaagatatttgaagaagcaacaggagaaatatctcgcagatttgacagcaatcctaaaaagagagaaagaagttacggaaaaatcccattgaaatgtatttcgttgctggctgccaaccgcagcagactgcagcacatcaagcatagaacagacaagaaaatgacttgagacaatcacaaaagaaaaagttttaaaggagttgaccaatgtttactttcgagagagtgactgacgcaaatgaacaggaagctgtttccatctatttaaataatcagccgtacttttctttaacggatgatgtggcttccttgcagttattaaaacaagatatggtagataagcctgaatcagtaaagaaagaaaataaacgctttttttagttagaaaggatacaaagccggtggcgatcattgactacttagttgactatccagaagagcaaaccgcttatattggattattgctgatcaatgaaaagaggcaaggacacgggaaagcaatcgttcataaattagaagaaattcttctttctgaagggatgacgaaactagccttggccgttttattgaataatcaaccagcgggtaaattttggcgatcgttaggttttcggcccactaaagaaaccattgctcaaatgaatcaaaagaaagtcaaggttctttcttacgaaaaaatttttgttcacccaagatcaaggaactagcgagtctattttcaataagcaaaacgtcagttgactctctacttgagataagggtcaagatgcaatgaggaggggtatcatgtatttttgcacaccacgttgttttatccgtgattttaggatcgaagatatcccaacagttatgacctatagaaatgatttagagtggatgaagtaccaaggtttcaaaaacagggaaaaagctgcgtatatcaaagaactgctgcatacaaaaagtttttctgaaggcaaaaatttagcagttgtgcacactttagatgaacggctgatcggtgatatctatttaaaaaatgaagcagattttttctggatcggttacacgatccatcctcatgagtctcaaaaaggatatggctcagaagtgattcaagcgacgatacagtggctgtttgatcaaggtgttcaatcagtaaaagcagaggtagcgcctggaaatctagcttcgataaaacttttagaaaaaattttttttcgttagtcaaaacggaagaagacgcactctatcagttgcatcgccttgactacccacaacagaaaaataggataaaacaggaacagtgaatcagaaagttctcttcaaacaataaaaatctttttaccttgttaagaagcctaggctaacttggtaaaaagattttttttgacgaatccgcttcacgtttctttgacaaaagagttggtaagtgctcctaatttggtgatggttcgagcaaagattacgcttttctattttctccatttatttaatgcgggcatcattcgctcaaatacggggaataagatcaaataaaacaggaagtttccgctagcatgaaacaaatcaaatacgaagccttgaagataataggctgtaaaagaaggaaactgataaagccagacttccatcatagaaacgatcaaaccgtatagaataccacaaatgaacgctagaagtgcttggattaagcggctttgctttatgagagatatttttcctcccagatgaaaaaaagtaatcatagcagccagtgctacaaattggctgatcgtccaaggccccatccataaatagatatttgtaccaagcaaactcaataaagcaacgatcaaagcatcagacaaactgcctgccagggctaataaaaataaaatagcactcatgggctgaacgttggggatccagacaaaaaataagcgtccaacaatacaagacgcagtaaggagtgctaatagagaaattttttgaacggaaaatatatggctatgaggctggaacatcgaaatcgccgtctttctaattgataatcattctcattatacatgaaaaaaaataaatttcaagattgaaaaacacattatgtagtgtgataatgaattccggacacaatatgttgagtatgggaaggtggcacaaaaaatgaaatacagtaaacaaacgataagcaagctaaacgaggacattcatatgttcccagaagtctcagcaatcactactgagatgacgaacacatttgaaggaatttctcgcttgatcatgctcgatcgctattctttcaaggatcaaaaccaccaaacattagataagggtgatttggttattttaaccacaaaagaagatcctcaatatcctgctcgaggcatcggatgggtaaagtctattgatgacgacatggtctccatagaggttgaagaagagtatcgctcagctatagaaaatactgctgaacaagttaatggtcttgtcaaacgacggaaaaatgagatcgaaaaaccactggaactttatttcgaacaaatcgctcgccgagtcgctagaaggatttccgataaagagttagagcaggagttgtttcttgagcagttttatcagcagattgccgaacaaaatctgattccggcaggtcgagtactttatggcgctggtactaattctcaagttacctatttcaattgctttgtgatgcctttcattcacgactctcgtaaaggaatcgctgtacacagacaagaagtgatggagattatgagtcggggcggaggagttggtactaatggttcaaccttacggccaaaagcttgtgtggtccatggtgtcagcgggcgatcctctggtgccgtctcttggttgaatgacttagccaatttgacgaatctggtcgagcaagggggaagtcgtcgcggcgcacagatgatcatgatggctgactggcatccagacattttggcgttcattatttctaaaatccagaatcctgcagtattgctgcagttaaacaaaacattgaaaaatgacactatcaaacagttaatcaatgaaaaacttcattttgatcctttgtcaaaaatggaagaaaaaatgtatacccatattgctcagcttccagaatcatcagataccgagcaaaatgaaatgatcaagacagcaaaagaaaagctacggcatggaggaagttatacggttaaaaaaagcgacttcctgactggagcgaatatttctgtttgtttgacagaagaattcatggatgcagtaaagaaagacgattggtatgcgctgcgtttcccagatatcgataattattccgaagaagaaatggcggaatacgatgcaaagtgggcagaagtcggagatgtgcgagaatgggaagccgccggtcataaagtaaaaacctatcaaaggatcagggctcgtgaattgtggaatttgatcactttttgtgccacgtactcagctgaaccgggtatcttctttatcgataatgccaataaaatgaccaatgctacagcctatgggcaaaaagtggttgcgacgaatccttgtggtgaacagccgttaacaccttatgctgtatgtaatctagcagcagtcaatttggcaaacatggccgatcatcaaacggggacagttgattttgctaaattaagagaaacggttaaaaccgcggttcgttttcaagacaatgtcattgatgcgaccccttacttctttgataaaaatgagcgccaagcgaaaggtgaaagacgtgttggacttggcatcatgggcttagccgatctactgatctattgtgagaaaacttatggttcagcagaaggcaatcaattagtcgatcagatttttgagacgattgctatcaccgcctatgaagcctccattgatttagcaaaagaaaagggcagttttccatttttgattgggaaagatgatcaagagacacaagcattacgagagaagtttattgacacagggtatatgaaaaaaatgccagcccatattcgtgaaggggtgatgcaatttgggattcgcaactcacatcttttgactgtcgcaccaacaggatcgacgggaacgatgaccggtgtgtcaacaggattagagccttactactccttctcctattttagaagtggcagattaggcaaatttattgagatcaatgcagcaatcgttgaagaatatcttgcgaatcatccggaacaagacaaagatcagctgccagacttcttcatttcagcaatggaactgtccccagaagaacatgttggtgttcaatgtgcgattcaacgctgggtggatagttcgatttcaaaaactgtcaatgcaccgaaagggtattctgtaagtcaggtggcgaaagtctatatggatctctacgatggtggtgccaaaggcggtactgtatacgtggatggcagccgtgactcacaagtattgactttggaagcaatcgacaatgaaataaacactcaagtagaaccagcagaagatcaatttaccacccaaacgaatgaaccagtgatttctggtgacatttgtcccatctgtcatgaaggaacaatagaagaaattggcggttgtagtacatgtaccaattgtaaaattcaattgaaatgtggtttgtaaaaatagatcattagtgattgaagagataagagatatacctgtgtttcagtaaatatttagtatgtttttcgatggataaaagagtagattttaatgacgtatgtcgggaaggaataaataaatgaaaaaattgttagtcgtaatcgtgttgttaggcggattatttgtcactagtggctgtcaaggaaatacgcgtacatcttcagaaaatacccaaaatgcacaaagtgtagaaagcacagaacgttctgttgatcagaaacaattaacagctacgattgttatcacgaataaaggtgaggaagtcacctcaaaagaagttgcttttcaagaaaatgaatcactactgaaagtaatgaaagaaaactttacgattgaagaaaaagatggctttatcacttcgatcgatggaatgagtcaagatcaaaagaacaatgtattttgggtctatacagtcaataatgaaatgagtgataaaggtgcccaaaatctgcttttgaaaaaagatgataccatcacttttaatttacaagcattctgactcacacgttcgcgaggtgtgacataagtttttcaaccgacgaacgttctgaataatgaattgaatgttatattgtgaaatttgtgggattgtgcaatcaacgattgacaaacggtcaaaatccaagtagatttaatcaggatgctaaattcttttatcaaagtgatttgttttatcagataagagagggtctgggaaaacgaggtggaaatagtgaaccaaaaagaaaaaatgcttgaactgatcaaaaagaaacaaggtggtggccgatcgaaacaaatggacacaccaaaaaatgatcgcaagaatatgcgtaaaggaccaaagatttacaataagtaataaatgagcacgactcattgagtataactgcgtaaggaaatcctccttacgcagttttttgtctcttttagagaggggtaccgactgattttctcaacacaaagtactcctcgacttcgccgctttccttttgtatgattaaggaaaagagaataggaacggagtgagaaaatgaatgtgaaagaggcattgatggctggagcagaaaaaagtatctttttgaatgatattgaagtcgatccgaaaaccattaaagcagtattgatcaatgaagtcgttcccctagatccaacagatgatttttatggggcaacagatggcgcttatctttctacgacgttgccgttgtttcaacaagctgggatctatgtagattctgcccatgacttattggatttagggatttatttgaccaatgcgatcaaaacgccaaaacacacgacgacaattgaaacacaaactatcactgaaaatctaccgctattagaaaaagagttgtcgttatttccaaatattgaagtgattatgctaatgggggatgtcgccaaaaaagccttcaatcaaatcgccaaaaagcagcaaaaaaagaatgcgattccctccgttgcaacttataaaatacgccagactgaaatctactatggaaagatccgcttattgccttcttatattatgacagggaagaatgtattgatcgaaaaatctaaagtcacgatggcagccgaggatatcgcgaaaatgtatcaagtgattacgaaggaatgatttgattagcagacgatcccatgagctcgcaggatgacagatcttccgctgaaattataggacacactggtgtaagggacttccagcgaactcatgcgaacctttctgtacaagtattttcggatctgctatacttaaggaaatcatttactgaaggaggaaaagtcatgacagcggcaatgaaattgtggatcgatcttttgaatcgttaatttaatactattcaaaagtctaggtgatcgcgatttcaaaggatgagtgtctacttttccaattacttatgaagggatagcgccaggctatgccttttttgtgttttcctttttcctagacgagagagggagatcattcatggaaacattaacagtccaattcaaacagatcaaaaaacaatatggcgctaaagaagtcttgtcaattgaggcgttatccgcctatcatggagaacgaatcgggatcattggtagaaatggtgaaggaaagtcaacactgttaaaattaattactggagaaatccagcccgatagtggcacgattcagacaaccacgacctttaattattttgcctaaattggagggatcgaggattcttacgatttttcatccgttgactgggaaatcatgagccgcttttcgttaccaaaacattcaatggatagctggagcggtggggaagccgcaaagacacgattggttcgaacactatcgaactatgaaatgggtcttttgttggatgaacctaccacccatctggatcagaaaagtatttcattgcttattgaggagttgaggcattactatggtacattgctttttgtcagtcatgatcggtttttcttgaaccaattagcaacgaaaatttgggaaattgatcaggggtgtgtacgggaatatcacggaaactttgatgcgtataaacagcaaaagaaaatggaattactgcatcaaaaacatgcgtttgaaagtcacttgaaagaaaagaagcgcttggaagcggcgattgaaagtaaacttcagcaagctgaaaagattagtaaagtctctaaaaaaatgcagcagaaaaatagtcgtcctgatcgattggcatcatccaaacaaaaggatacaattcaaaagaatcttcataaaacagcaaaggcaatgaaaagccgtttggatcatttaggtgagcatcattcattgactgagccgagacaaattatttttgcagcaccaaaaggcatagaaattcataatccttatccgataaaaggacacaacgtttcaattcaatatgaacagagagttttgtttgatgattgtgattttcaatttggattaggaaagcgtatcgcgattgtaggtgcaaatggttgtggaaaaacgactttattgaatcatattttaaatgatggtaaaggaattgtcttatctcctaaggtagtttttgctagttaccaacaattgtcctataaaatgactgaatcggaatcaattcttgtttatttaatgaaacaaaccgattattctgaatcatttgtcagaagtattttgcataaccttggtttttatcaaacagaaattttaaagcccgtaaaaaaattgagcggaggagaagcgacacgagttcaaattgcgctactttttgttaaaccagcaaatgttctcattttagatgaaccaactaattttattgatcttcctacgattgtagccctggaaaaactaatgagggattatcttggaacagttatatttacttctcatgatcaattatttgttgatcgagttgctaatgaggtctatcaagtcgtcgatcaaaaacttaaaaaaatcacttaaacgtatggccattttcttaatcgcatatgctcgtaacgttgaacgcaaaatcgtgaaagggtttgctgcaactgctttaatgtggtaaagtatagtcataattgaatgaacaggtgatgaagttcggcatagctgatagtacacaatcagtgctataggtatgactggaaaagagtaaataaaatcaattgaacaggctaaaaataaccgcttttgtaggtttatttaagttgcctagctattgattttatcttactctaacttctcttttcacggaagcgatgggtaaccatcgcttttttttattcttttatagtaatcacgcaaaaggaggaccaaagaaaactattcagttacacaaataatcaatcaaaggagcagaaaaatgcgaaacaaaatgaaagacttcattaaacagccaaaaatctatcaacaaaccgataccccattctggacagatgactatatttctcagaaaatgctagaaaatcatttggatccgagtatagatggggccagtcgaaatcggtcctttatcaaaaaatctgctagctggatctgtcaaaaagtcccaccagcagattatccaagccttcttgatctagggtgtggaccagggctctattcagaattgtttgctgaatctggctatcaagtaacaggggtagatttctcaaagcgatcgatcgactatgcaaaagagactgcacgaaaaaaacagttgcctatttcctacctaaaacaagactaccttgagatggaattgacagaaacttttgatttgatcgtgatgatctactgcgactttggtgcattatctgcaaacgatcgacatctgctggtagcaaacatttatcgctggttgaagcctggcggaaaattcttgctagatgtctttagtgcaacgaaatatgatcagactgtagtgcagcaatcatgggagtactcagaaggagctggcttttggagcgagaactcctatcttgcattgaataagaccagtaaatatcccaactttgtctggctagatcaaacaatggtgatcactcaagaggatcagataacttacaatgtgtggactagttgttttacagagcactcattggctgccgaactggctgcggttggatttaaagagtatcagctttatagcaacgtttgtggcgaaagctatacgaaagagagtgaaacaatcgcgatgttgctaaagaagtaaacggtagggttacattttaggggacaattcgctaaaatgaagaggagggataaaatgaaaaaagtcttattgtttctgatgaagcttcctttttctgcccatcaaattaatgcagatttgtgaaggaatatagggtaacaatcaaacaagatttgttcaataaatataaaactgcagaaacatcgttgagaggaggcgtatcatggaagaattacaaaaaataccgaatgtaggaaaggttcttgccgaacacttgcatgcgattggcatcgattcggtggagaaaatgaagtctgcaacagcagaaaccatttttatgcgtattcgtacccagcgggatcccggggcttgtctacacatgctctatgggattgagggagcaatacaaggaattcctaaaacgcagatttcagctgcaagaaagcaagaattgcgaacgtttttccagactgtttcttgattgatttgcaaaaggagtcaaaccaatcagatttgtgatctaaaacacaaaaaagaaggaccatacaatgcctgacaacttccgtgaaaaacattggaagtgtctgattgattgttcggtcttttttgttttttagggcatagctttatgctaattacctttaagcagttctctcaaagtaggcatttcttggacttggtatttttctttaaaggcggcgatttcagctgccgaaaatttttctggatccaatttcaattcctctacaggaagtggacgagcattttcgatcttgatatcaataactacagggccgttgctggtttttgctgcatcaaaagcaggtgttaggtcttcgtaacgagtgatggtatatccttttgcaccaagtgcttccccaactttcccaaagtctgcgccttctagaaagactccaaatttcttttgttcggtatcctcttgttctgcttcaataaatccaaaagaatcattagagaagacgatattgatgattggtaattggtatttgacttgggtcaaaatatcctgcatttgcatggcgaaaccgccatccccactcaatgtaaagacttggcgatcggggaaactcaattgggcggcaattcctcctggaacaccgttccccatcgtagcgaaccagccagaagtggtaaaacgctgttctcctgtcatgtctaaatgtcgaatactgttgatcgtcacatttccgacatcactgacgaaaatcgcattcggctcggcaatgcggttaatttctttgaagatcggttctggacgaagaggagcttgttgattggtgtcaaagtgatggcgccaagcatgccagcgaacaatgttttcttgatttgctgccagccattggtctgctggtcgtttggttcctagggtgacccattgattcaacgcagtgatcccatcgcctaacaccgagacatctgtgttgtgccgacgcccaaatttcgaggagtcaatgtcgacttgaacaaaattggctttcggattaaagaaacgacggccaaatggaaaatcgctccccacgaagacaatcagatccgcttcggctagtgcttcgttcgcaggttttgtggcaactcttccggcaaagccaagaaaattcttatacatatcaggaacgattcctttcgccaaaacagaagccgcaactggcattgaaaagaactcggaaaattctttgatcgctggaaatccgccgaataccccttgtccaatataaagaacgggtttttttgcttgttcaaaataggggagggcagcttttaagtctgcttcattaggtaggatcaccccagttttatggtttttggctgtggcgatctcttgggcttcaatctctttaaagccaaaatcaacgggaatcgtcacgacagcgacgccccgaaatttataggcagccttgatagcttcatctaccacgtgtggtagactttcaggggacatgaccgttcgattgtagatgctgacatccgcaaacatcggattttcattcatttcttggaaatcattgtaattcattgaacttgatgccacttgaccgagtaatgctactacgggcacattatccatttgagcatcatacaatccattgattaggtgggtagctccagggcctgctgagccaaagacagccccgactttaccagttagtttggcatcagcagcggcggcgagagcacctgcttcttcatggcgaacttggatatagcgaacggattcgcgttcttggtatagtgcatccattgtggaattaaatgaaccgccgggaatgccataaatgtgatcgatcccccaagcctcaaagacttttaccatggcgacacctgcattgatttttgtcattttcttcactcactttctcctctttctttcagtataaagtattctaaaaaagacaacaaaaaatgtgactcgactcacaagggaaactcccggttatcagcaatcaaattcaacagaggaaaaatagtacaaagaatagaatacctgcaaaaaaagatgcacctgtgtcagatgcatctaaaatcatggtacccttattcagccatcagaggcttgttcgctagaagccctagaagtatgcgattctttatgaaactaattggataattctgcgataaaacgagccgcgatttctttggggcgggtaatcgcaccgcctacaacgatacctgcaacccctagacgctgaacttgtttggcttgttcaggagaatgaattcttccttcagcgatgacgggcaactgttcagcgacaagttgttggatcagttcgaggtcgggtccatctgttggctcacggtctttggtataacccgctaatgttgtgccaacaaaatcgaccccagcttggtaagcattgcggccttcttcaaaagtcgcaatatctgccatcagcagctggtcaggatacttttctttgatttttttgataaatgcattgatggttagaccatcgtgcctttttcgtaaagtacaatccagcgcaatgacttcgacaccggttgcaactaattcatctacttcgcgcatcgtagcagtgatgaacggttcttcaggtaggtagtctctttttatgataccgatgattggcaaggacactttttctttgatttgctggatgtctcgtacagagttggcacgaattccgaccgcacctgcttcttgagctgccaccgcaaaaagagggatcacgccaccttcttcggtataaaagggttcccctggcagagcttgacaagaaacgatcaagccaccagatattgcttgtaaaaattctgttttgttcatggatacagactccttttctcgatttggtagctagcgctacgaatgctactaagttgattttgtcaattttgtcaatttttcaattaagtcagctattcaaagcggcttctacctttgacttcttcaaagggactatagcatggaaaaatggcttttgtaaatgatttctctcggaagcagtcaaatggacaatgactgcgagggctgtgaagatccttctcgttttactgaaaaccgccgctcattctcaaaaggaacacttcaagcaagaaacaaaataagtttagggctttttctcatcaaaaaagctttcccagaattcagattctgcactgagacagaaatgattctgggaaagcgctcttcagttgcaattattttgtagcggctcgtttgaaaacaggaatttcattattagagccataatcattcatagtgatttcttttaattgagtcagatcttcttctgaaattgtaaaagcaacatcgccgttgtttttcatatgttcaatggatgctgttttcggtaaaggaaggagatctaattggaggcaatagcgaatcgctagctgtggcactgatacatgatattttttagccaaagaacgaaagaggcccgcaaacatttactagtcgaagaatgagaaaatttgcggcaacgttttgaggaactaaaagggactttgaatcgtttagataacaaaatcaagtactatgacgagcaatggcaagagtaaggattgctgcattcccgaaagacgaagggcgtgcagcagtccttttttaactattgtttgttttctcagagattacgatatttatcaatgtccaatggctggttttccgataataattcgtagtcaagctgattcgattcatcatcatggataatgtgcagcaattggtttgaatccttgatgggtcctaggctgataatagtaaatcgatcattgattacttccaaattctggagtgcccctgtaaaaactttacgtatatggtgcgcagtttttattttttcctctgctttttctaccgcttttgttaaagtaaagccttcatcaaggaaacgtttgatcaactcaactttgatcaccgtgggcagtcgatatttacgtggcgcattttcttcttgaggaacggattggataaggcctttttgttcccagtaacgcaattgacgcggagagatttcacacattcggctaagctcgctgatccctaccagcaaattgtcattttctaataatttacgaaaggtttgagacatgctttctccattcttgtaaaggtatttgtttatattgtaacttgttttacttttgtgtcaagtaggttgacaaataagtgagaaagttttaaagtgtatagtgctgttgaaaaattttgtgaaaagagtgtgaaatatgacaaataatcgtcctttagatatatacggtaaaccgtacaatcgttctttattggttgtcgttttgctgatcggtacgttttgtacagtattgaatcaaacattactgacgactgcctttccaaccttgatgaatgccttcgatattacggcttctgatgttcaatggttgacgaccggattcttgcttgttaatgggatcatgattccaattaccgcttggctgattaataaattcaattcgaaaaatttgtatttaactgccatgacgattttcttaattggtacaattgcttgttttgcagcacctaatttttcgatcttactattaggtcgtttgattcaagctgccggtgttggtatctccatgccgttgttgcaaaatatcatgttatcgatctttccgccagaaaaacgcggttctgcaatgggaatgtcggggatcgttattgggttggcaccagctttaggcccaacactatccggctggatcattgaccactatacttggcgctatttgtttggaatggtcattccaatcgttattttagtattgatcttagctgtcttcttgatgaagagtgttatcgagctgtctcatccgaaaattgatattttttctgccattctttcaaccatcggtttcggaacattgttgtatggtttttccagtgtcggagacaagggctggggaagcgtggaggtcattagtttcttagtagttggggtcttgtttatcgccttttttgcttggcgacaattgcacatcgagcatccatttttggaattacgcgtcttttcatcgaaaacattcacattagcggccattctttccggtgtgaccaatatggccatggtgggcgcagaaatggtcttgcctttatatatccaaaatattcggggagaatctgcctttcattctggtttgatgcttttacctggggcattggtaatgggggcgatgatgccgatcactggggcaatttttgataagtatggggcaaagcgtttagctattaccggtatgttcattttgactgctgcaacattgccttttgcctttttaacaaaagacacaccgatcttgcatatcgtcattctttatgcgattcgtatgtttgggatttccatggttatgatgccagttactacttctggtatgaatgctttgccaggaaacttgatcagtcatggtacagcagttaataatactttccgtcaagttgccagctcaattggaacggcgattttgatcagtgtcttatcaaatgtaaccaaaggaaatcttccaagtgatggcttgttgaaggcaacaccgcttgcttacaaagaaaaagcgatcgaagcaacactttctggttatcatgctgctttttatgtcgctgttgtctttggctttttaggctttttgattgcctttgcattgaagaaaaaagagcctcagttgactgttcttaaaggaggtgacggcaaatgatgttagtgattgtcgtcatcagtgtaattgcctttgcgttattaaatgtttttgccaaaaataaagtccaaactgttatttcacttctctttggtttggtttttgtcttaagcttaacagcaatgatggccaatctatccgcacattttgggatggaaaaaaccaccacaacgactacacagccgttagtttcaagcagtgacaatgatcagttgccaatgctgttgtatcaacctttgggtgatggaactgagaaaatctatttgtaccgcacagatgagtcgcaaaagaaaccaaaacaaacaagaatggaccatgtgacgaatcatgtcgtcgaagatgccaaatcggcacaaaaagaaacgaaaacgacccgttggacgtataaaaatgatttttatcgtttcttgtttggaatagctgggaatgatgaagagtttattcgtgaaaagaatacgttctctcttccagattcttggactctcttaactgttgatcaagcgaaaaaactagccagtcttgttgaaaaccaacaagaagcgatgaaaacagaagcacaaacttttgttcaagagaagatgcaagccgctttgatggctgacccaacaatggatgcggcggaacaaaaagcaaaaatcagtcaattcactgcagaatatcaaaaagaagcaatagcaaaactgattcaagaagcaaaaaaagaataaaaaaatccctctgctccaagagagtgaatcactcccaaaagttagcttttatggctaacttttggcgaatggttcaatcactctagctgcagagggattttttgttgattaaaaagtgaactgctcaatgcgatcaaaggcttcttttagcattggcattgattgcgtagcagctaaacggacataatgatcaccggtcgtctcaccaaaagctttaccgggaatcattagcacgctagtatcttttaaaagtttttcaacgaaagtaacagaatccaagccagttttttctatgttgatgaaggcatacatacttcctttgacaggagacaaagaaagaaaaggaatagtagcgactcgttgctgaatgtaacttagccgttttttgaaggtttccacgactgctggaacaagttcgtcgtagtgattcaacgcatagattcccgctcgttgtgagggggtaggagcagaataagcaatactttcattaatcaacttggctgtctgattgatggataaaggagcgatcatgtaaccaatccgccagccagtcatagcaaaagcttttgaaaaactgctaaaagtaatcgtccgttcaggcgcaaaagtggccataggaacaaactcttccataaaacaaaaggcttcgtacacttcatctgacaagatcaacaaatcattttcttcggcaacttcagcaattgctttaaaagttgtcggcgaaaagacagcaccagtgggattgttgggagaattaatgataatggcttttgttttgtcggtaatcgctgcttttaatacatcaatagcgatctgaaaaccatctttttcaaaggtagggatgaaaaccgggcttccgccagccatttcaacttgctgcttataaggagaaaagtaaggctcatggataattacttcatctccaggatccaagatcgcgcacaaagcaagatacatgccatgtaacgcaccaactgaggcccgtacttgatcgttggagaaagtcaatccataatgggtctgataaaaatcgacaacagcttgaataaaatcggcactgccatcagaagccgtgtattttgtatgtccatttttgacgtccgtaaaagcggcagcaatgatcgactgatcagtaatcaaatcaggatcgccgatggacagatctatcaaatttggtgttttcttggcaatcgttgcaatgtccattagtaaattttcttcgggtgtttgaaatcgttgtgcaatcatcgactgtttcataggttcatctccattttttatagtacttttcttaaaaaatcttgtgtgcggctattttgcggatggtcaaagatcgcttcaggtgttccttgttcttgaatgacaccgtcagccataaagatcacgcgatccgctacttgcttggcaaagcccatctcatgagtcacaacgaccatcgtcatgcctttctcggcaagtgcctgcatcaccgctaatacttcaccaaccatctccggatcaagtgcagaagtcggttcatcaaaaagcatcacatctggatccatagccaacgcacgagcaatagctactcgctgttgttgcccaccagataaacttgcaggatagctagtcgctttgtctgctaatccaacttgttccaaaagtgcgtaggcttttttctcagcggtctcttgatcttgtttttttacttttatggggctgatggtgatgttctccaaaactgttttatgaggaaacagattaaagttttggaataccatacccattttttgacgaatttgatcgatcacaatctctttagccaaaagatcgtttccttcaaattcgatttgaccactggtaggttgttctaaaagattcaaacaacgcagaaaagtacttttgccgcttccagaaggtccaatgatcacaacgacttcacccgcggagatttcaagatcgatctctttcagaacttctgtcgcaccaaaattttttaaaagtttttttacgctaatcacttgttttcattctcctttctgcaactcctagtaatcgtgaaagagcaaaagtcaagacaaaataaatcaaggaaacaatcacgtatggtaggaaaggtttgaaactggcaccttggacgacccctgtttggaagatcaattcggagacaccaatgacagagacaacagaagactctttgatgactgtcacaaattcattgccgagagcaggtaaaatgttcttgatggcttgcggaaaaataatgaagcgcatcgcttgaacttgattcattcctaatgaacgggctgcctccaactgacctttgttgaccgcattgatccccgcacgaatgatttcagccacataggcggcactattaagtgcaagagcgatacaacctgccgttaacttggataaatccagacctagtacgccagtcccaaaataaacgataaagatctgtactaagagcggggtacctctcacgtattcaatataaacaatcgcaatccaacgcaaaatttttgacgcagaaagtttcataaatgccagtagactaccagcaatcgagccaaagagtacaccgacaaaggctaaaaaaatagtataaccggctcctgagagataaaagggcagatatttgctaaagaagccttcttcaggtgctcctgtttcttcattgaacattagagcataggcttcatcttgatattgactcaatagatcgttatcgacaatcgtcttgatggaagcattgattttttccaggagcagcggcgcctcttttgaaatagcaattgctgtttctttcgtacctttctcaaagaccacatcgtcggcaattgctaagttatcatttgattgaacataggcttccgccacaggaccttccatcacaacagcatccactttttttgagtttaaatttgtgatcagatccggaactttttgcaaagaggttacaagtgagccggacaactcattcttagctaattcttcttgtgtggtttgtttttgagcaccgacagctacaccgttgaaatctgctgttgattgaaaccggttctgatcttcttttcgaacaatcactttttgttggacttccatataagtgtcagaaaagttgacttcctttttacgttcatcggtagcagccatccccgaaatgacaagatcgatttttccagtttttaatgctcctaacagcgcatcgaaacctaattcttcaattttaagatcgacgcctagatcatcagcgatttttttggcaattgatagatcaaagccgacaatttcgtctttgccatcaatcgtggcatgaaattcatagggggcataatccgcagataagccaacgatcaatgcgccattctgttttattttttcatagacgggatctgttgtttcagcgtgtaccagttttgtggtaacacaaaagaacaggacgatcagtatcattgttgaagcgaaccatttacacatctttttcattcaattactcctttttttgttttaaaatacaataatagcttgaattatgtataaaaatacaacaaacgttagaaatatcgtatcatacctttgtgggaagtcaatccctttcttggaaaaatcacgaaatatatttgagttttcagaaaaaacagtgttttctataagtttacaggttgaattgttttttacaaatttgtaatataagaaaatttatttcagaaaatttccggaaattatgaaaatatttaagattcattcggcttttttgattagcttaaaagaaacttgtaacagttaatcgatcttatgtttactattaaagccttatttagcaaggttttaagtctttctattttttatttggtacgttatttaatttcttttatcaaagtgaaatatttcgtcatcgaactgttaccaaggacttaacgtatcttgctattatttatcaagtcgttacgacgaaaacttacatagagcgagggaaataaaatttatgaaatcaattaaaacattcgtattaactacagccacaattgctggttttgctgcattaagtacaactgctaacgcagacgaaatcaaacacgtggtgaaatctgatgacacattatctggtctttctttaaaatactttggtaatttagatcatattgatcaaattgcaaaagacaacaaactgaaagatcctaacatcatctacgatggtacaactctgattattgacaccgacaaaaaagtatcatcagataaccaagcaagtgaacaacctgcaaaagaaaccacacaagcagaagaccaatctgccaacgaaaaccaatctgaatctgcagcaagcagctattctggaacaacgatgacgatggaagcaacagcatatagttctgatccagcagatgttttaggcggcggaactgtgacagctaccggccaaaacttgttggaaaatccgatggcagttgcggtggacccatctgtaatccctctaggcacaagactttatgttgaagggtatggagaagccatcgccagcgataccggtggtgcgatcaagggaaatatcatcgacgtgcatttcccaactaatgcacaatgcgaacaatggggccgtcggaccgttcaagtaacgattcttgattaatttctccaaattttaagaacagacccatgcacgtatgaggctagggcataagtaaaaacagtcagaaagattttcgagaggacagttgttccttaaagatcgggtctggctcaacttatgcctagcctttttgtatactcagataaaaaaggatgcctctatgaactttgcccaagacattttgcttttttcttgagataatgaatcaaagaggaggcgttcaagtgaaggtagtattgatacggcatggcgaaagcgaagcaaattttgaaaactattggacgggctggctggatgtggccttgacagcaaagggtcgggaacaagcttggcaagcgggagaaaaaatcaaagaattgggtatttcttttgatgtagcatttgcttcttatcttcagcgaaccatcatcacctgcaacactgttttggaagcaagcgctcaattgtgggtacctacctataagacatggcggttgaatgaacgacactacggacagttagtcggtgtcaataaagatgaaatggttgctcggtatggaaaagatcaagtccaaaagtggcgacgagggtataatgaaccgccgctgtatgtttcagaaaatcattttgatcgtcgttatgacgacttagatccacgcttgattcctaaaggagaaaacctaggaatggtcgttgaaaggatcacccctttttggtcggatgatgttgttcccttcattcgatcaggaaaaaatgtcttgatcacaggccatggcaatagtttgcgggctttagtgaagtatttggagaatgtacctgaagaagaagtcgacaaaatcgatgtccccaatgcagagccaatcatttatacctttgattcacaagctgttttacaagaacgactgggataaagacgaacattattactaaaaaccgcgctttcgtatgaagtttcatcgaaagtgcggttttcttatgctataataagaaaaattttatgaaaggcgggctcttatgaaagcagtattgaccgttattggaaaagacaaggtagggatcatcgcaggcgtcagccaactattggcagaattagacatcaatatcctcgatgtttcacaaaccatcatggaagaatactttacgatgatgatgttattatcgatggaggcaaatgcagattttgaaacgattcgtgagcaattgcataccaaaggcgaaacactaggtgttaaaatcagtattcaaaaccaagaaatttttgataccatgcataaattataggagggcttctatggaaatcaatcaaatactagaaaccattcgcatggttgaagaagaaaatcttgatattcgtaccattacaatgggaatctctcttttagactgtattgatgccgatatcgatcagatgtgcgaaaaaatctatcaaaaaattacgacaaaagccaagaacttggtgcgagttggcgaacaaatcgaaacagaatatggtattccaatcatcaacaaacgaatctctgttaccccgattgccattgttgtggcagccagtcaaccgacgccacaagactgtgtgaaggtagctaaaacattggatcgggcagctgagacagtaggggtcaatttcatcggtggctacagtgctctggttgaaaaagggtatcaaggcggtgatttagcattgatccaatcgattccagaagcgctggcagcaacgaactttgtctgttcttcggtcaatattggatcaaccaaagctggaatcaatatggatgctgttcggttaatgggggaaacagtcaaacaaacggctgaagcttcagatatgggatgtgcgaaattagttgtttttgcaaacgcagtggaagacaacccgtttatggccggtgcttttcacggtgtcggagaagcagatgtcgagattaatgtaggcgtcagcggtcctggagtggtcaagcgtgcgcttgaaaaagtcaaaggagaatcttttgacgtcgttgcagaaacagtcaaaaaaacggctttcaaaataacccgtatggggcaactcgtcggacgggtagcttcagagcgtttaggggttccttttgggatcgtcgatctttctttagcacctactccggctgtaggggatagtgtggcgctcatcttggaagaaatgggtctggaatccgttggaactcacgggacaacggctgcattggcgttgttgaacgacgccgtcaaaaaaggcggcgtcatggcctgcaatcacgttggtggtttatcgggtgctttcatcccggtttcagaagatgcaggcatgatcaaagcagttgaaagtggtttgttgaatctagaaaagttagaagcgatgacagcaatttgctcggtgggcttagacatgatcgcaattcctggagatactactgcagaaacgattgctgcgatgattgctgatgaagcagcaatcggcgtcatcaaccataaaacaacggcggtacgtatcattccggctaaagaaaaacaagtaggagaccgaatcgaatttggtggtttactaggcacagcacctgttatgaaagttaatccagctaaatctgctgactttattcagcgaggcggccgaattcctgcgccgattcattctttcaaaaactgatcatcttctgaaactgcgatataaggaacacacaaaatcaaatgctctcgattggacgaaaaggtgattacttttcgaacattcgctcataaagacctaatggtattttggaggggatgctagtaaaaaaatcggacattttgtttagtgtagcacttagttcgcagtttcttctttgtgatctaaggctttagccctatgctgatcatctggaaataatatacaattaacgtaattttatacagataggggtgtcaagaatgaaaaagagggtagtgggcagctccatactggtagtgatcgtcatgttcgtgctacttgttccccaaaaagtatttggtcaaagttttgtgaaggataatgcaggggtcctctcagcagagacaatcgcaaaaatcaatcaattaaaccaagagaggttccaaacgttgccaggaagtccagaatacgctgttgtcacgcttaaaaacttagacggccaaacgatcgagacagtaaccaatcagttatttgatgaatacagttttggtcaatccgcgtataacaatggcttagtctttgtgtttgccatcgaggaccgggaatttcgtttaggctatggggatggcttaacgtatattttttctgatttgtcagatgatgacctgatcgatgaagatacaaaagttcttttgcgtgatgaagactatgatcaagctgttttaaatgcttctgatcgcgtctatgaggaaatgaaaacagcggacgaaacggttggtctgaacaaaatttatgcggatgggcaacagctactggcagaaaaaaaggcccgagaagccgcagagtcaaagaaattctggttgctgttttggcaacttgttagttcagttagtgcattgattattgcagctattagcggagtgataggctggcgcaagcgccaaacgaagaaaagttttcaagcagccaatgtgattcctcctcatattcattcggatccagcgtttgatgaaaaggctttttacagatgggcaagtaaaagaaggaattatcagaccttcaatcactatattgttgctggagagtgtttgaaggctttaaaaatgtacctgcttagtgaagttattccgaggcaattagctgagtttgaaagaatcagtccgcaaccagctagaaaccaaatgattcaacaagcattgaaaaatccgcagttggccgatcaattcgtgcaagaatatatgaaagatcataaaaatttgaagatctttgggcaagagttagcccaaggccatgacacattgcgaacctatgaaacacaattgcagcggcaactcaaggaacaattacgagattatgatttaactggagatattcttgcagaaaatgcttatttgattccacagtataaaaaagagattcagcagttggcggaagaagaaattcagcggcgtagtctcaacaacgattatttggctatgctgcttacgaaggaaaagacgtatcctgaaatggtgcagacgagttctcaggaaatagctagcttgattgattctgttaaaacggatgctttgtttactatcgatctccatgaagtatataaaaatcatccagatctacaaaaacaagtaggtgatttttcgggggaagatcgttcagaactattgaataatgctcgtcgtgaatacaatccaaccactatggatcaatctttagtttatttgttactcatcaatcatgtcacgcgacaagaacaggtcatcgcagagagtaaaagctcggatagtgatttcggtggctttggcggtgggtccagtagtgggggcggaatttccggaagctggtaatttttaagggctgtgacaaaaggttgtcatagctcttttttcgaacgcacggtaagcggtcgcttttgcagtaataagccgtaatttcttgcaactaatcacttctgtctcaaccactttgccttttgatctaaagacaaaggcggacttttgtgataaactttgtaaagttgctgaaaaaacatttttttcacggaaacatttcagcttatttttagaaaatgagggttgtacatgtatcattcgtatatttgggactttgacggcacattgtttgacagttacccaatcatgttagaggcgtttcttaaaacattgaaagacgctggatttgatcccgattcgagagaaatttatcgcatcttgaaagcatcgtcatcaaaacaagtagctgagaaatatcaattggatttcattgattttagcgctcgttttaaagcatatgaagcactagatgagcggctacccgtttcatttccgggaacgaaagaagctttacaagcagtagtagaccatggtggaaagaattatattttgacccatcgtgacgttgtttcaacgaaagaacttttaatgaaagaaaatcttgaccatttgatcgtagagatcgtgggaccggagaataattttccccgcaagccggacccaacgtctttgaattatttagtggaaaaatatcaattggacaaaacaacgactgtaatgatcggtgatcgtgcgatggatgtgctggctggacgaggggcaggggtgcaaacgatgttctatgatattgaaggattgctaactgatttggatgcagaccatgtcgttcattccatgaaagaaatcgaagaaattatcaagtcttgagcaatcaagactttttttgcgtacttctttttgaggtgattcattatggacaagtggttggattttgggaaaaaatattggcatttatccttgagcgcgctgttggtcattctttttctatttggtttgttttttaccccgaatgagccagaatggcccgaagcagaagaatcttcaccaattttcgaatcagagagtaggaaagagtcattggaccagatcgttgtagatatcaaaggagaaatccgaaatccgggtatttacaccttacctagtggagctcgactgtatgagctgatccaattagcgggcggggtcactgatgaaggaaatgaagaagtcatgaattttgcccaagaattgtcagatcaacaattagtaatcgttcctcatttagatgatccggtagtttacgctgacaacggagcagaaggaacacttgctcagaaccagatcgatttaaatacagcagatagcagccagttacaagagcttccaggcattggcgcgaaaaaggcagaggcaatcatcgcttaccgtgaagaaaagggtttttttaaaaccgtggaagaagtgaaagaagtttctggtattggccctaaaacttatgaggctttggaggggttgatcaaggtgcgatgaaaaataagagaaagaataagagaataagctcgcgattcagtggcttttctgtttcgttgttgtagggggtatagggagtataggggtataaggggtataaggtaagtagagaagtcatttttatttagtagagcgatcgggtgaaacaagtcagtatcgcgacgtattatgctaacaaaaacacactctgtcgcaggcggccggtggttgtaaaaattaatcttttgctcaaaaagagtcaatcgatacaactatatgttgtatcgaatgctaggggatctaaggaatttatcgtgtgaatacaaagtagaccttttctcactgtgtaatccatttgtttatttcagcaggaaaagatttgctaaaggtaagctataccgattacatgaaaaattcttcatttttcccaagataaaattaaaaataattttgaaaacaatttttttgcctaaacttttcctcagaatgctatcaatttcatttcttcctatttcctgatagtttataataacggacgtaataaattcgggaaaggagcgagcctatgctggaaaggtatatagaaaaatgcgtgattcgtcaagtctatctttgcgagcagttgtatgagaaggaaagcgtgcttattgaccgtttagccgaacagctggatgtctgtcctgcgaccattatcaatgacattgataaaattctgcttttactaaaagaacgcattgctaccgccactcacgagaagcatacatatcaagtggtttttactgccggatcttccttatcagagcttactcaaaccatttatcaaggatcctattttttacaagttctctatcaatttttgattggagagagaagttggcaaaaaatatcggaagaggtgtttatttcattaagcaaggtttataccattcggacagacttatggagattttttgaggaaatgggctatttaaatgaagagcaagaggaggtcgagatccccgagaaagacttccgctatcttctattggctgtaatgaactatttaggaaaacgtcctgaaaaaaatcagtcttttattgagcaggcttgtgaagaactgatccaattcgtggaacaacgtttttttctgcgttcttatcctgaagacgaacgtcaaatcattcatttagggatccacatcggattagcaagaagccgaatagctcctatttgttttgcatcaagggacaaggagatggcacgacagacaccgctatttcaattattacagcaaggtcttaaagaacttgtagtttctttgtgtagcaatgaggacgaagaattttacatctattcactttttaattcacgcaagtatcagtgcaataatctggagctgttgcaaagagattttgaagtcgtttatcgtaatcacattcatcgctgtccggagatgttggaactcacgcatttattacaaaaccgattaggaatctccgagaaaaatcatttgttgttcgaaaaagcgttactaccgtttcttcgttccgcttggggggacatgcagatctttcaaacggatcgtctattctttctctacccaagtgagagggaaatgtttgatcaaataatggagagccttgggttatgggcaaaccaaaaccagcagatgattcgatggaatgacaatctggttcgtaaattgacgattttactaagtttgcttcctgatgctgaaaaaactgaacatttggaagtgtatattgttgcaccttctgattttaaatacttgtattatcgccaacagttagaagaaatgttagatgagcactttaccataagcaatatgatctatcaccaattaactgatgtggtggatgatgtctttttttgtaccaaacgaatgattttatgtgatgcttctctttatcaagaaacacttcaaacgaaaaatactaaaatttatccggtgactttcaacactgtttcctctgttatcttagctatcaatcagacactatatcaacgagtcgaggaaatctttgcaacaaagagtaattgaaaagactgaaaaagataattattgatacaaagagagggattgcgcacagccgtgcgcaatccctctctttgaactaaagtagtgcaagcgaatggcactacttgggacagttccgcaatagaagtaacgttgagagctctaatgattttggggaagtttcttgctagaacgtgttggcctttttaatgagtaaagccgtaggttttgatttcttgttttttatgatagaccagatgagcctgatcaagtgccagcagagcttctttcatgtcttgaatataatcgtgggccatattcataccaaagtctgcacgaatgaccaatcgttggatgatttggtcgtctaaattggctggtaatggataagctggaacttgccaacctttcatgagtaaacggtctgctaagtcatacaacgtccattcccgttttgaatcgtctttcaatttgtagcagacgatcggaagttgagcgccatcattgatcatttcgaatagaccggttttttcgatttcttttgccaaataaagagcaactttatgggtcttgtcatgaatcgctttgtaaccatcaaaaccatagcgcacaaaattatagtattgtccgatcaactgagcagcactatgggagaagttgatggccatggttggtaactcaccgcctaaatagctgactttaaatacaagttcttgaggcaagtaagattgatcgcgccaaagtacccagcccacacccggataaacgagaccgtatttatgaccggacgtgttgattgatatgacatttggtaattgaaagtcccagacgagatccggttcagtaaaaggggtatagagaccaccagaagcagcatccacatgaatgtagactttatagtccgttgtttggttgtattgttcaacaagttcattcaatcctttaatgtcgtcatagcgtcctgtataggtgattcccagaatgccaacgatgccgatcgtatattcatcaacatagtccatcactttatcaagattgatcgacaaatggttttcatccatggggacttctctcatctcgatatcccagtagacacagaatttttcccaacaaacttgataaccgcttgaaatcactaaattaggtttatgagcatttagatcgagaccgagtttttccgcccgattacgccaagcaaatttcattgccatcccacctaacatacaggcttctgaagaaccaatggtagaagtgcccatgaatttttcttctttgcttgcatgccacaaatctgcaatgatattcacacagcgattttcaatttctgctgttcgtggatactcggatttgtcgatggcatttttttctagagtttgtgtcatcagcttaactgcttccggttccatgtaggtttgacagaatgtagctaaattcaaacgggcatttccttcatcaagtagctgatcttgtacgagctgataagccattctaggttcaacagattgtgaatttagtttgtatttcggtaaatcttctccttcacaaacagctccaaaaattggttccaaatagtctgcttcttcgcggttttcttttccatataacatgataattcctcctaatagataaaaaatacggttaatgtttgattgtatacttctcgttttgaacgatgtggtgttctcctcgagcgcttggataagtggcagggttcacatctcctgttttcatatgaaccggttcgtcgatttgagcttctttgccacgtttgtcatgaagttcatagagaatgaatggtaacaataaagtaacgatgaaactaatcaacaagatgacttggtaagttctgtcttcactggcaggaatcgaagaaggtgggaagaacgaaacgaataatgcgagcagcgacatgatgagccctaatcctgcgattattgtttttccgattgtttttcctggaacattataggtacgaggaagatcttttttcttaaaaagcagaacaaaatagcccaagaaaaacagcaaataaccaatcaaataaatcactactgtcagcgaaatagctaccaagaaagataagttgtttccaccgccgccaaacgttagaacagcaccccatattgaaacgatgattccttgaatcatgattagcggaacagggacgccatgtttgttgtgctttcgcaaaaaagtcggcagtaatcctcgttgtgccgctgcaaacatacctcttgatgggccaacgacccatgagctgacctcacccatgacaccaaaggcaatcattagtgcgattaacttcactagccaaccaagatgcggattgaagtgaagcaacaacgattcaaaggtttgaatcactccggcactgagagataattctttttgcggaatgaccgcagcaacagagaagccgccaatagcgtctaatgcaatggcaagaatgactagcaaaatcattgctagtggataatttttttgcggattttttagttcattaatgtgggaagcagaggcctccacacccatataagccaaaataaaagaaacaaataccacgagagtagaaacttttgaaaagtcagggataaatgctttttcactcagaggtatttgaataggatttccaccgatgaaataagctgctgcttgcacaaataagaggatagagggaatgacgatcccgataacaaatcctgcttttgcaatttttgctgttcttttggttccacctaactgagaaaacgttaagagccaaaaaataatcagcaaaccgatgtacttcatcaatggatcattgttgagggcgggaaaattcagcacataagaaagtgcccctaagatgaagtaaatcatcgtaacaaacccgacagtaatctgaaaccactgaaagaagatcgctgcaaagccaaaccgttcgcctaatgtttcactgacccaactaaatatcccaccgttctgccagccttttaccgtcgacatttctgccgcgcagagtgcaacaggcaaaaaccagaggatacctcctaataataagaagaaaaccaaatgaagttgtgacgtggcaaaagttgggtactcgtacacagtcaggaccatcgaggctgttagtgcgaaaaaaccaaataaaaataattttttctcgttcatcaaatcgcttctttctaagtctaatatcattttggcgctgttatctcggaggagaaagctgatgtatgcttctgttcattgtgtgtccacctcttttcttacaaaacgaagtataaaactttttgggtaagaaaatttccaagttttttctgaaaacaaaagtgaaaaagaaaaaaagctggaaataaaaaagaagcgtgtattttgctgttaaaaaaaagcaagagcactcgaaaggcgtattattttatgtacccctgaaaaactagaaataggcagatggtgttgctacaaaggttttatgaaaaatttgcgttaggcaagtgtttcaatgaaagggaggaatcggaagaagaaagagagaaaaggcgaaaaaactattatacctgggaagagtaaagtgaggatctttcgttccatccattagtagcatcaaatattagtagcatcaaagaaaataacaagcagttttattcccagtcccttaatcaaaaataatacccagcaggtaatggagtcattttgagaactgtttgactgacggtagcagtaggaaaaacaagcagaagtgaatggagaaaaagacactaaaattcatcagcccctagattaatcagtgggggtatagtatattataaaaaattgtgtactattatttcgcaatcggaaaaatagaaaaaggaggtacgcagatgacaagcgatctgaataaaaagaatcaatgggttaattctcaaaaccgatcgatagaaggaaataaacgaatcccttgggatcagtattttatggctcaagctgttttactttctcttagaagtacatgctctcggttagaggtgggggcgacactagtcaaggaccgacggattattgccggcggctacaatggctcagttagtggagacgttcattgtattgatgaaggctgctatgtggttgacggacattgtatccgcacgatccatgcagaaatgaacgcattactgcaatgcgccaagctaggtgtttcaaccgacaatgccgagatttatgtgacacactttccatgtttgccttgtacgaaggcgattttgcaggcaggcgtcaagaaaattcattatctgaatgactaccgcaataatcaatatgctctagatttgattcaacaagttggtgctaccgtccaccaagttgaacttgatccagcatattttgaaaaattatcttttggtgccttgaatggggctacacatacaaacatgccgtgaccatttcctttttgttggagtgatcattggttgctgggtaacaggtttgtatttgaaatctgttcttttatttattatcgcaagttatcttcttctgggactactgataaaaaaacaagttgctttattggcactttgttgtcttggcagtgtattgatagggggacgtatggtcagttttcaaaatcctcagttggaagaaggatcgttaactgctgaggttcttatctatcctgatacaatcaaagtcaatggtgatttagtgacatttgaagggaaactgcctgaaggtaaagtgatggggcgttatcaagtttcttctctttccgaaaaagaccaatggctcagccgacaaaattggcagaaatcactaagagtacatggaaatttcaagatagcagagccaatccgaaacaaacatgcctttgattactcattttatttggctagcaggaacttcttaggcacattgacgattactgagattctcgcaagcaaacaaactgccgggatttcttcgatccacaggtggcgagcagctgcagtgactcacgtgaagcagtttttccctgagaagttggcatcttatataaacgcattgttatttgggtataaagatcatgagtttcaagagatccgtcaattattcagtagcagtggcttgctgcacttttttactgtgtccggactgcatgtgtctttctttttctactggttagaacgaggtctgagacgaggaaagctcaccagagaggagatgctgcttcctcttttgccaattatcctgatagccgccattttatttggtggttctatcagcgtgattcgagctgttctcgcttatgggatgaccgttcttttgcgactgttttcctgtcacctttcagcctgtgatcgttacggtatcgtgctttttctaacacttatgatcgacccaaaagtttttctgcaaacgtccgggcagctatgttttttgatgacttttttattgctcatgcaaagaaacgtacaggtttcctcagtgatccgttctcagtttttgccgttattggcagcgccgctgctgatgcacttattctatgaatttcctttgttgggtgggatttttactcttcttttgcttccgttgtttcaacgttttatcttacctagctgttttgctctttttgccgtaagtcttttgataccaaaaataccctatctggatagttggagtgaaacactttttcatggaatagaggaaatcgtcttttttcttggaagatttgccctcacgactggaaggattcccttagaacttgctattttctgtagtcttcttggtttatttttttatcagcggcatcagttctttttttgtttcttagtcagtttgtttttaccgctacttttacagcgtctttttgtccctgctgccgttacatttgtcgatgttgggcaaggtgatagttttgtcttacaaacagcctttaaccgggaagtgtatgtgattgataccggcggcagtttatcttttcctaaagaggcgtggcagcaacgcgcgtatcaagaaaatgcacacgcctcattgattccatttttaaaaggcgagggagtcaggcaaatcgatgggctttttttgactcatggagacacggaccatctaggtgatgcattggcattaatgacagcaatccctatcaaaaaaatatacctagttcctggaagtgaacaccatcctcagattgccgcgttaatcaagcagcttccgcaaggaactgttcactggacaaaagtgggtgaaaccattggtcgcgaccttgctatcactgttttagctcctgagtctggacaaggtgaaaatgaagattctttagttttgaaggctgaaattgagaagtggcgctttttatttaccggtgatttagatcaaaaaggggaagaaaagttgattcaactgtaccctcatctccaggcagaagtggtaaagctagggcatcatggcagtcgtacctcgacttctgctcgttttatcgagagcctttcacccaaaatcggcatcatctcttgtggcaaagacaatcgctatggacatccacattctgaagttttggaagtgatggaaggaagaagcatcttgagaacagatcagcaggggatgatccgcttcagctggtcaaattggcatcgtgtccaacagctagaaacatggctagactatcgattagaatgatgataggatggaaaagaaagcgggggaatctatggaactgcaaaaagcgttgcaagagattcgaacgaaatctctgcaacctatctatttagtgacaggcacagaaaaatttttacaagaacaagtacgtcaagcatttttaacgcgttttgaagtttcaaaagatgacttgaattttgcttcttttgatatggaaagagagcctttggatttggtgattcaagaagcgcaatcgttgccgtttttcggtgatcagcgattgatctttgtggagcggcctttttttctaacagcagaaaaaaaagccaatgttccagaacatgaccttgatgattttttgctgtatttaaaaaatccaatggacacggctgttttggtgatttttgccgaatatgataagctggatgaacgaaagaaaatcacgaagcagttgaaaaaagcagggatcatcatcgatgtggcaccaatgaaagaagcggatgttcgtcggtacttgcaacagacattgacaaacgatggtattgaaatgactagagaagcttttgaactgtttctgcggttgactgatctccatttatcaaaagcgatgcaggagctgcaaaaattacgcttgtatgcaggaaaagatgcgaagatcacaaaagaaatcgttcagcaattgattccaaaaactttagaacacaatgtttttgaattgactaatgatgtgttacaaggaaaagtagcggatgcctggcggttgtatgatgatttgttgttacaaggggaagagaccattaaaatcaatgcaattttgattggacaagtacgcttgcttttacaagcgtcgattctgatgaaggtcggctatcaacaggcaaatattgctgagacactaaaagtccatccctatcgggtcaagttagcaatgcagcaggcaagaaagttcaatgaaaagcaattagcagccctttatcatgaattgattgagaatgattatttggtgaaaagtggtcaaatcgataaagaatttctgtttcaattgttcgttttaaagcatggtaaaagacaagggtaaaagaaagccgaagcaatcatttgattgcttcggctttaatttgcttatttcgcaatttttttacttaaacgagatttgtcacgactagctttgttcttgtggatcaatcctttagtctcagccatatcgattgctttaacagcatctttatataacgcatctacgttatcagcaccagcttcaacagctagatcaaattttttgattgctgtacgcattgtgcttacttgagatgaattcttagcattagccgcttcgcttgtgcgaacacgtttgattgcagattcaatgtttggcatgtatttcacctccaaaaataagttcttatacgtttaaaacgtataaatcaacactagtcattatacctaatgcaagtttcatttgcaataaaagttgtaaagaaattttacttaacacaaaaaaaggtgcttttgccagctattttttcttgttctatattattattttaatcctttacatattttttaatgaatacttacaaaaagtttacactttgttcactttctatgctatgattacttcggaatttttaaatgaggtgtataaatgtgaatatggctttagttataaccatcgtgctctcgttaggcgttattttcgtcaatgggtggacggatgctccaaatgcaattgccaccgcagtctctacgagggtcctacgtccaaatgtcgctattggaatggcggtagtgatgaatttccttggggtcttagtgatgacgtatttcaatgcgcaagttgctgaaaccatcagtaacattgtcagctttgatactgctggcggctttcatgttgcacaaattgctttagctgctgcacttttttcaatcgtcgtctggacggttgcggcttggtacttcgggattccaaccagtgaatcccatgcattgattgctggacttacaggagcagcaatggcactgggcggattacatgcagtaaacggacaagaatgggtcaaagtactgatagggctggtggtctcaacattgatggggttcattggtgggtttatcatcaccaaattgatcgtttggctcttccggggaacttctcgtcgtaaagcaaataaagtttttacgatcgggcaagcggtcgcagctggagcaaacgcttttttgcatggcgcacaagacggtcaaaagtttatgggggtctttatgctaggtctttactacaataaccttgtagaaaaaagcggcaacggctttacgatccctttgtgggtaatggcgttatgttctcttactatgggaatcggaacctctgtcggtgggatgaaaatcattaaatctgtcggcatggacatggtcaaactggataaatatcaaggtttttcggctgacttaacagcggcaatctgcttgttcttatcttccgtgtttgggattcccgtttcgacgacacatacaaaaacaactgccatcatgggtgttggcgcatcacgtcgcttttccagcgttgactggcgcatcgtgaaagaaatgatttatgcttggatcttgactttcccaggctgtggcttgattgcctatgtaatggtaaaagtattacttgtgattttgtaaggagagagaagaatggcacgaaaaaaaagttttgattattttgcagcgatggagcagctagcaaccaatggtcatttagcggcaaaacgtttctcagttctgataaatgattattcagaagcagcgttaactgaagcagcagcagaaattcacgcattagaaaaagaaggcgatcaagtgatcgcagaattgaccaatgaattatatgattcttttatcacaccgatcgatcgtgaagatattttgattatttctgaacgcttggacgatattttagatggcatcatgggattgacttatttatttgaaaatcttgtgatcaagtcattacgtccggaaacagctgatttcgctgtcatgatcgaacaggccacacaaggtgtgcagacggcattaaaagagtttcctaagttcaaaaattcaaagacgctacgacaaatgatcaatgatgtcaatcgtatcgagtctgaagcggaccttttgtactctaaattgaaaaaggcccttttcactgatgaaaaagatgtcttagaaatcattaaatggaaagacatttatgaccgctttgaaacaatcatcaacgacacagaaggtgctgtcgatattattgacggcatggtcatcaaaaatacgtaatttagctaaaaacactgcgatgtccaaaaggacatcgcagtgtttttattataaagatactaaccagtaaacgatcaaaaccgcaccaagtacgatacgataccaaccaaagaaagtgaaatcgtttcgtttgatataattcatcaagaagcggatggctaacacggaaacgataaaggaaacgatcgttccagttaataagataactgttccttgcaagtcaaaagcatttccaactttaagaaatttgtatattttccatatacttgcaccgaacatggtagggatacctaagaagaatgaaaattctgttgcgacaaagcgggaggcaccaatcatgattcctccaagaatcgtagcgccagagcgtgatgttccgggaatcaatgctaatacttgaaacatcccgacaattagtgctgctttataagtgaacttgttcaaatcggtacattttggttctttgtttttgtttcttttctcaacgacgatgaagccgatcccgtagatgatcagaacgatcgaaacagagaggaaattatagaagtgagcgtctaaccaatcgtccagtggcaaaccaatgatgactgatggtaagacagcaatgatcactttcgaccagagtgtccaagtgtctctcttttccaatgcatttttggtgggtgaaaaagggtttaatttatggaaatagaggtaaacaaccgccagaatcgctcctaactggatcacgacgttgaacatcgccataaattccgggcttactttcaacccaataaattcatcagcaaggatcaagtgaccggtactactgatgggaagccattcggtaatgccttcaatgatcccgaaaaggatggctttaataaaattcgcaaaaaacatttgttcagtcctttcttgtatggtgaaatacattacatagtatacctgttctaggaaaaaataccaaacacttcctaaaaaaagagcagtttttcttgctgaaaaaatcgtcaagccgaggatcttttcagcaaaaaactactcttacttttgttgattcattattgcaagaaaatcaagcgaggagatcttgtgaaagggcaagtcctttcttgatatattcagtgttgcccacttccgcaattgtgaattcaccattttcataaatcagtcgggtaaccgaaccattatcgatgtccacacgcacgttgttttcgttattgatcaaatgcagcaagaaggcgatcgttagaccatgggacacaactaacgcattgccgccgccttttttctcaacccgatacgcgatgtcttcaaagccggttttgacccgttcagtcaattcatcgaaggattcggcccaattcgctgtgtccgcacgatgaatcgcattggcaacagcctcaaagctgacatggctagcaatcatattgtcataatcagggaaatccaacacacgaggaatgacgccccacatttctgcatcataagccccttctaaagacccaaaacaccattctctgattcgtttatcaatatgataaggaatctgaggcccacgtaaatgctcgcccaagatcaagcgcatggtttcgatagcacgaccactatcactggatactgcttccacaaaatcgatctcccggagaccaagcccaagataatggattccttgttcacctgtgcgggtcaatggagtatcacaccatccctgaacgcgctgtaatgtattgaacattgtcttaccgtgtcgcacgacatataattctgttcttgccatatcgtttcctccttttacatttatctaaaaaatggatttgtccgtttttcgttttcaatcgtcgttggctcaccatgccctggataaacagttaattggttgggcagaataaacaactcagattggatactcgttaataattgttccaaattaccagttggtagatccgtacgtccaatactgcctttaaaaagggcatctcctgaaacgacaaaatcatcaaaaataaagctgacactcccaatggaatgtcccggagttgccacaacgcgaaaagagatgccgtcaatttgataatcttttaacgccaattcatgctctgcaggacgtgcagtaataccgcctaagtcaggatggcgaccagaaagattttttagaggatctcctaaccaatcttgttctaatggactgacataaacggggatactgtaatagtctcttaagtgatccactgcaccgatatggtcataatgagtatgggtcaataagattgcactaggctttgcttctgttttttcgatttcagcaatgattcgttcagcctctgctcccggatcaatgattaataaatgcccatcttgccaaaccaagtaacaattctcttgaacagggccggtgactaagccaatgattttcatattttaacctcctctgtttcttcttttagtatagcctaaagtattcaaggaaacaaaaaaagctttttaaagattcacagttttgctctttatttaggaaaaagcaagagagcgtaaaatggctcttcttgcgctggtggaagaaaccaaagagaaaatgagattaaaaaaatctgcaaaaaacggcagtttgattaaaaatagggtcgtttttaaaaaactatcccgaaaaattttctaagaaacctccgtaaaaaaaatacactgttatactgtaattaatttaaaaaaccttaattatggaaatagtggaggcagtaacatgaataagaaagtatgtctagttttatgctcattcttttgcagcttgttactcgcaagctgtgggcaagaaaatcaagcaatcaaaacgagcgaacctacgacagctactgcgaccaagctcagctccacaaatgccgagaatgtcgacttgatgctgattcaagaagaaagcagtcaatttccgcaaagccaaggtgtctatgatctgcaaggagaagaattgaccatcgtcaaacaatacttgcctatgacagaaagtagcagtgatgaaacgttgagtggttcggcactcaaaaaaagaaatgaaacgatccaagcagactttgaaaaaaattttgcttccgcgaatcttcgcttaaaagatgatccctttgaaatctacgagacgaccttacatggggcttcgttttccatcgatggaaaatatttatttttacgagcccatgggttggaattaaaatttcagtatgatgaagcaaccaatcgtgcctacgatgagaacaatgtgcgctatgaagttcaagtggatcagtgacggatactaatgagaaatgcctgaaaatcagaacagtataagaagtttaagagaaatagatgccacaagaaagtgacaagtcgattgagacaactttcgattgcgatgatgccaagaattaaaacacatcattaggcaagaagagaggttgtttttgatatgctgtaaccattgtaggcattttttaagaaaatgtgaaaaagactgcaaatcctgcaggctttttttgttcgctttaaaatcagtgaagcttccgatataatagctccgagaaggtgatcacgtgtataaaggaaaaattgctgtccgaaaaatcgttgaatttattttgcgccgtggtgatatcgatagtcgcaaagtcagtaaccatactgctcaagaaggcgctcgtatccatcgacgattgcaaaaagaagccggcgatgcctatcaaaaggaagtctttttcaaaatagaaagcgagatcgaaaaggacaagttaactatcgaaggacgtgcagacggcttattctatgacgaagagaaacaatgttgggtaatcgatgagatcaaaacgtcagaaccctactttgaagatcttcctgaggatcaaatcgatttattttttgctcaagggatggtttatgcttatatttaccttcaagaagaaaagttgacggaaattgaagtccaactaacctattaccagacgacggagcagctgatcacccgcgtccgtcgccattttacagtggaagaacttactgaattttatacccacttgatcaatgaatatcataaatggctggtttttcaggaaaattggcgccgtgttagaaatacttcactacaactgttaaaatttcctttcgaaacgtatcgaaaagggcaacgggaattggctgctgccgcttataagacgttaaaaaacggcaagcgattgtttgctgaagcgccaacaggtactggaaaaaccatatcgactctttttcctgcactaaaagtattaggagaaggggatggcgatcgtttgttttatttgacggcaaaaacgatcactcgccaagtagctgaagatgctttaagcaagttggcggataacggcagtgaaacaaaaagtgtgaccctcactgccaaggataagatttgctttttagatgaacggaattgtacgccggaacattgcccatatgcgaatggctattataaccgaatcaatgaagcgctatgggatctgcttcatcatgaaaatcaaatcacacgagaagtgattgaaacgtatggaaaaaagcataccgtctgtcccttcgaactttcgctggatgtcagtgtgttttgtgatgtcattattggtgattataactatctgtttgacccgactgtttatctccgacgcttttttgaggaaccagaagaagattactttttcttgatcgatgaagcccataatctcgtcaatcgttcaaaagagatgtattcagcagagattcgtcgcagcacgtttaaagatcttagaaagcaattgccaatggatcaacaaaaacttcgtcgagcattgaataaagtggagaaagaattctctgcgattgaaaaaatcgctgagacggatcattgggagtaccatcatcaaaaagaaccccatgaaacgatgaacaagcaattagcaaagctagctgagcttatgaaagaatggctgccagctaaccctgaacatacggctcaggaagcggtgctgcaaagttattttgaagtgaatcactttttgaaaattgctgaattctatgacgatcattatgaaacaacagtagaggtcactcgatatgagctgactcttcgtcaattttgcattgaaccggctccttttctacagcaagtgttagacaaaggaaaagccagcttgttgttttcagccagtttcacgcctcttgattattaccaggaagtgctgggaggcggagaaaaagcattacgctatagactgccaagtccatttgatcctgcaaatcaaaaaatcctgatcgcaaattacatccagacgacttaccggcaacggacagccagtctgccagcgatcgtagatgccctttatcgaatggttcacgcaaagtcaggcaattatatggttttctttccttcttaccagtatttggacgaagtagcagaagcatttcatcacgcgtatccgactattaagatgctcgtacaggatacagctatgaatgaaacggaacgagaaaattttttagcggaattcaaatacgacacggcggacgctgaagaaaaaacttcgttgataggattttgcgtattgggcggaattttttcggaaggcatcgacttgaagggaactcgtctgatcggaacggcgattgttggtgtcggattgccgcaaatcaatcacgaacaagaactgattcgggactattatgaagaaaaaaaacatgctggttttgcctatgcctatcggctgcctggaatgaacaaagttctgcaagcagcgggacgtgtcattcgtgattctagggatcaaggcgtgatcctgttgctggatcagcgttttcatacaacggcttaccagcaactgtttccattacactggcaacacgcccaaacctgctttcgaccagagcagattagcaaagcaatggaccatttctggcaaaaacaaaaagactctcagcaccgatcgtagaccgtacatgcggtttgcgatcggtacagagagaagtcaacgataatttgtgaattgtaaatcgatcggtaattcaagcttgcgcagcagctggatgactttttgtaaatcgtcacggcttttaccagtgacacgaatctgattgtcttgaatctgcgttttaactttcaattttgcatttttgatggcggtcgtaatttttttcgcctgttctttatcaatgccgttgatcaattctgcagtctgacgggctttggcgccaagtgcatgttcagtctgtgagaattggatattttttgtcggaacacttcgtttgatgagtttgctgcttaacacatctttgatttgttcaagtttgaattcatcgtctcccacgattgttaatttattgccatccattttaatttcaactgtcgaacctttaaagtcaaatcgattctttaattctttttctgctagttggatggcattttttacttcttctgtattgatttcagatacaacatcgaaacttgcttcttttgccacaaaagatcatcctttctatttttctttaattttaccatgagtcagaaaaaagaggggagagaaactaaatttttgcaaataatagtttcaattttagacacaaactgctattctttggaaggagattttttgtgaaggagaaatggcattgtgagtaaattatggacgaaacatcagcagtcggaaagactgaaaaaaatcggggttattttgttgtcaggattgaccgcagcgatcgcgttgaatttctttttgattcctgcaaaagtactttctgcagggatgaatggtgttgcccagttgatcgtagcagtcgggtgggaacaattcggcttgcatcttagtaccggtctctttattttgcttttgaatgtgccaatctttattttaggctttatcaaactaggcaaagcttccacttggatgagttttattaacgttgtagtggtctctttaataacgatgattttgcctcaaggagaaatcacaaacaatatcctcgtgaattcgttgattggcggcgtattacttggtgttggagtcgcttattcgttaaaaatgggtttcacaacgggaggaatggacatcctctcattgattttatcaaaaacgacaggtaagactgtcggcaaatatatgtttatgcttaatggcattattgttatgctgtcagggtttattttctcatgggagagcgccttgtacacgatcatttccatttttgctatgagttatgtggtggatatgcttcatacaagccatcaaaaagttacggcattgatcatcaccaccaaagcggaatctgtcggcaagaatatttcaaaacatgtgtttcgcggtatgacattgttgccatctgtaggagggtattctggtgttcctggaaatatgattatgatggtagttactcgttatgaaatctatgatttggaacaagctgttttagaagcggatgagaatgcatttatcaactttgttccgactcaatcgatcacaggacgttttgcaacagacgatgaacagcgtacattcaaaacaaccggagtctttccagaattgaaagttaacaaaaagaatcgtccctaaggaaaacgaaagcaaaagtgtcatttacaaagggattaaaacaagttatgatttgaacagatcatcaaaggaggtttcgactatgccttatactgaagcagaaagcgaagcaatcaaagaacgtgtcttagcagcgttagaaacagttattgacccagaattagggattgacattgtcaatcttggtttaatatatgaaatcgaatttgacggggaaacaggcgatacagttattaaaatgacattgaccactatgggttgcccattagccgacgttttgaccgaacaaattcacgaagcactaagcgatattccagaagtcaaaaatccagaagtaaaattagtctggtatcccgcttggacgaccgataaaatgagccgttatgcacggatcgcgttggggattcgctaggggatttgctgattccaatgcagcggctgttagtttcgtaagtcgtttgaaatagtatggatgtataagtacattttattctctaaataatccgtagaaattttggaactcttttattaacttttaagataagttagtaaaggagttttttagttaaacaattttttattagtatctgttgcattttcaataaggaaacgcgaccccatacctctgttaaacaggaagctttatagtaaaagaaaagtgagtctgaatttagcgaaatgaacgattttcgtgcgacgactgcttgtcgtttcagagaccatttttgtaaaaaatgataaaataatgatcgataactaaagaaaaggaatccggcctatgctattaacaaagaaaaaactctctcgcctagcggctccctataatgaaggagatatgagtattggttttgccgaatcacaaagtatagaaagtataagcagcaaaacgattttacttgtgaatgatcgccaagtaatcattttatttttgaacttttttcaaacaaaagtcattgatcacatggcttacaccagaaaagatctagtcaatgagcaattaagtcaagggttcaatgggttagacgttgtttggcgttttacagtccaaaataaaaaatggcgttttcgcatactaaagaaaatagtcacactaggaaaaatgcaaagagaattgatcgagcggctctaaaagagggtacgtacctaaattgtaaaagaattttgagcggtaatttgatgaagactgattgtctttttttcaaggatctcagcgaatagagaattgctacaaataaaataatgacgaaacctaaaacggcaattgcattttgcaaactagaaaggtaaactattttcaatgaagaaaggagacgaacaatgttaacgactaaatttggtgaatttacctacgacaatccctttatgaatgcttccggcgttcactgtatgaccactacggatttggaggaacttgcagcatcagaagccggttcttttgttacaaaaagtgccactttagcaccgcgagaaggaaatcccgaaccgagatatgtggatctcgctttaggaagtatcaattcaatgggattaccaaataaaggcttagactattatttgaattttgctttagagaaacaagaagcaatcgctcctgaagcacctttcttcttttctgttgcaggcatgagtgttgaagaaaatattgaacttctaagaaagattgaagctagcaactttcgtggtatcacagagttgaatctttcttgcccgaatgtcccaggaaagccacaagttgcttatgattttccattgacagaacaaattttagagcaagtttttagtttcttcacgaagcctttaggcgtgaaattaccgccttattttgacctggcgcactttgatcaaatggctgaaattttgaataaattccctttaacatacatcaattctatcaatagtattggtaatggtctatatatagacccagaaacagaagtagtagtgatcaagcctaaagaaggctttggcggtatcggtggcgagtatgtcaaaccaacagcactcgccaatgttcgggctttcgcgacccgactaaaaccagaaatcaatgtaatcggaactggcggcattcgttctggacaagatgcatttgagcatttgttatgcggagcgacgatgttacaaatcggaacggaattacaaaaagagggaccagcgatttttgcccgtctgaaaaaagaattgacagaaattatgactgccaaaggctacacatcgatcgatgaattccgcggtaaacttcgctcattgtagccgattagcaaattgctactgaaggaggaatggcatgatccagtttagaaaagcgacgctctctgatttgccggaaatgatggctctctttgagatgggcatacaatccttaaaaaaacagggctcacctcaatggcaaaatggctatggtcccactcgtgaaaaaatcaaagaagatatcaatcaacaagaaagttatctcttgttatatgacgatcaaattgctgcttctgccgctttagtcaaaggggtcgatcccgtttatactgcgataatcgaaggtagttggtcaggggatgggccttatgcatcaatccatcgtgtcgtagtcagtgaccattttagaggcaaacaattgagtgcacatttactaaaagcgctagaggaagaagcgttagcaaaagggatccatgatttacggattgatacctatcaagcaaatattggaatgcagaaagtgatcgaaacctgtggttatcaatatcgtgggcaagttgttttccctattccacacggtgaacgactggcctatcagaaattaatctaattgattgggtgaatatagtaatatctgctgtaattgccagaccataagcggaatggctgagccatactaattccttaattcccttagcgggttcaggtcgaatttgggcagcgtgtttagctcataaataagatgttttttgaaagattgatcatgacggaaagaaagatagcaagttttgcgtagctttattatgcagggcttgctatctttttgtttatttttattccgaatagacgaaattaattaaatgtataaaaatagagagttatcactttattttaatattgtgcatatggtaaagttgatttgagtaaacaatgtaggagaatccaatgaaaaaaagaaaaagtatgcgtaaggcgttggcaatgctagcggctctattgatcacccttggacaaggggtgcctacggttgaagcattgactgtcttagagaataacgcagaatcagcaatagtcgattcaggctcatcaatctcagacgaatcaaatgaatcctcagaaccatctgaagaccgaacggccgattctttcgaaaccgcatcaagcagtcaaagtatggaaacagaagaatccattgatgaaagtcattctactgaaccatcgtcttctagtgaaacgactgaggaaacaagtgaaagtacaagtacgtctgaaagtgagacatcttcctcaagtagcagtgcgtcgacaacggattcaactaaggattcaacaacgcctagtatgtcttctactaccgaaaggccatcaggaaccagtcattcatcaaagccaaatgatacgacagcaaattccacccaaagttcttcggaaccaaagacatccaacacaggttcttcagtcagccaattgccgccatccaatcagcctatagcagattcttcccagacagttgatttatcagataaattggttaccaccccaactgattctaatttgaatggctatatcttgccgttgttgaatcagttagcaaatgaacgatccgcagcgctgatttcagaagcgttgaatcaactaggcaaaccatatgaaaaagatgcgcagggtactggatttaataatctttcgttgcctattgctgtttatcatggcgtttttgatataaaagggatcgaaacttataatcagctcagccgggtaggaaagcaaacatcacttgaaaaagccgtacctggagatcttttgttttggaaagacggtcagcaattagtcaaagcagcaatttaccttggacaggataaactgatcatggcagatcaaccccaagcggaacaaatagtcaaggaagaaaaagcggcgacagaaaacaatggcgtacgcatttatactattactgataaacagaatagtactgcggaaacaaaacaattgatccaagaagatcaggtaaacaaaccagatgtagtagttcatttttctgactcgcaaaaagtaacacctcatggacaatcactaatcgctaagtatgcggctagctatgattttcgcaagaatccgcaaacagaagcatttgttgcggcaattgcagaagatgctcgggaactaggcttaacttatggtgtgtatgcgtcggttatgattggacaggcaattttggaaagcggatctggtcagagtggccttgcttctcctccgtattataatttgtttggaatcaaaggaacttccggtagtcgttccgtttctatgatgacagctgaggataatgggaccggagaattttatacgatccaagctgcttttcgtgcctatacaggatacaaggagtcgttaaaggattatgttcatttactgcggacaggaattagtgggaatgctgatttttacaaaaaggtttggcgttctgaagcaaaaaactacctgcaagcgactgaatatttaaaggggcgttatgcaacggatacgagctacaacaataaactgaattcattgattgctgtctatgaattaacgaaatatgatgaagccaaagctggcagcggcgttgtcctacaatcaaaagaagcgattcccaaagagtatcggcagctgttggtgtttcctgattataacggtgtaaattataatacctcaggttcttatccagtcggacaatgtacttggtatgcttacaatcgggtcaagcaattgggcggcagtgtggatgaatatatggggaatggtggagaatggggagcaaccgcaaaacgtttaggctataaaacggcggctactccaaaagcaggctatctgataagttttagcccaggcactgctggctctagcacacaatatggacatgtcgcctttgtggaagcggttggcaaagatggcattttaatatcagagggcaacgttattgatggcaaaacgatttcttatcgaatcattcccaatgagcttgcttattcgcaaagtgtcagttatattgccccaaaataaaatttcgaccaaaaactctagcgaatcgtaaaaattcggttgtcaacttctgccacaattgctaagatagagcacgtaaaggacggtgccgaatgaaaaaacgtatcaaaaagaaaaaagcctataaaaagtatatccaagacatattcacaggatatgaagaaatgttggaaaatcctgagctcaaggagagatcctttagttatttgaaagaagaaacagtcttgagacgtgatgaaaacgatcagattcgttttcggactcgggacattgattaaactgcctattttaggcagtttttctttttcaaaaataattgaaagtatttcagaaaaacacttgctctttcatacgcttaatgataaagtagtgaacgttggcaaaacacgccgacagtcaaaacctttcaaaaaaacttttttaaaaaagggcttgaccaaaacggaaacagatgatattataacgaagtcgcaaatttaaaaaatcaatttgatgctgatgcagcaacaaaaaagattgaaaaaagttgttgacaaataacaattcatttgttattctaatggagtcgctgatgacgcacaggaagttgttgaataaacactttcgaaaaaaacttttaaaaaagagttgacattcacttgtcggtctgatatgatttaaaagttgctaacgcagcgcagtagacctttgaaaactgaacaaagcaagcaaacgaaccaatgtgtagggcgcttcattatatgaagcaaaatacatgcaagcaatagctagcaaagttaattttatttgagcttaacgatcctatggatcgttcaaacaaatcattatgagagtttgatcctggctcaggacgaacgctggcggcgtgcctaatacatgcaagtcgaacgctttttctttcaccggagcttgctccaccgaaagaaaaagagtggcgaacgggtgagtaacacgtgggtaacctgcccatcagaaggggataacacttggaaacaggtgctaataccgtataacactattttccgcatggaagaaagttgaaaggcgcttttgcgtcactgatggatggacccgcggtgcattagctagttggtgaggtaacggctcaccaaggccacgatgcatagccgacctgagagggtgatcggccacactgggactgagacacggcccagactcctacgggaggcagcagtagggaatcttcggcaatggacgaaagtctgaccgagcaacgccgcgtgagtgaagaaggttttcggatcgtaaaactctgttgttagagaagaacaaggatgagagtagaacgttcatcccttgacggtatctaaccagaaagccacggctaactacgtgccagcagccgcggtaatacgtaggtggcaagcgttgtccggatttattgggcgtaaagcgagcgcaggcggtttcttaagtctgatgtgaaagcccccggctcaaccggggagggtcattggaaactgggagacttgagtgcagaagaggagagtggaattccatgtgtagcggtgaaatgcgtagatatatggaggaacaccagtggcgaaggcggctctctggtctgtaactgacgctgaggctcgaaagcgtggggagcgaacaggattagataccctggtagtccacgccgtaaacgatgagtgctaagtgttggagggtttccgcccttcagtgctgcagcaaacgcattaagcactccgcctggggagtacgaccgcaaggttgaaactcaaaggaattgacgggggcccgcacaagcggtggagcatgtggtttaattcgaagcaacgcgaagaaccttaccaggtcttgacatcctttgaccactctagagatagagcttccccttcgggggcaaagtgacaggtggtgcatggttgtcgtcagctcgtgtcgtgagatgttgggttaagtcccgcaacgagcgcaacccttattgttagttgccatcatttagttgggcactctagcgagactgccggtgacaaaccggaggaaggtggggatgacgtcaaatcatcatgccccttatgacctgggctacacacgtgctacaatgggaagtacaacgagttgcgaagtcgcgaggctaagctaatctcttaaagcttctctcagttcggattgtaggctgcaactcgcctacatgaagccggaatcgctagtaatcgcggatcagcacgccgcggtgaatacgttcccgggccttgtacacaccgcccgtcacaccacgagagtttgtaacacccgaagtcggtgaggtaacctttttggagccagccgcctaaggtgggatagatgattggggtgaagtcgtaacaaggtagccgtatcggaaggtgcggctggatcacctcctttctaaggaatagtacggaagactacacatcgtttgcctttgttcagttttgagaggtttactctcaaaatagtttgttcattgaaaactggatatcgaagaaaatcaaaacaagtaacacacaccgagttgacaagttaaagagttttttaataagttcaacgcttattttcttgagcaaccttctatcgctagaagaagtactcaccgaccgtaaggtcaaaggttaagtgaataagggcgcacggtggatgccttggcactaggagccgatgaaggacgggactaacaccgatatgctttggggagctgtaagtaagctatgatccagagatttccgaatgggggaacccagcatcttttataggatgttacacagttgtgaatacatagcagctgtgaggtagacgcagagaactgaaacatctaagtacctgcaggaagagaaagaaaattcgattccctgagtagcggcgagcgaaacgggaaaagcccaaaccaacaagcttgcttgttggggttgtaggactccgatatggtagttgaaacagatagtcgaaatacttggaaaagtatgtcaaagagggtaaaaaccccgtagatgaaatctggctcacatctaggaggatcctgagtacggcggaacacgaggaattccgtcggaatccgggaggaccatctcccaaggctaaatactccctagtgaccgatagtgaaccagtaccgtgagggaaaggtgaaaagcaccccggaaggggagtgaaatagatcctgaaaccgtgtgcctacaacaagttagagcccgttaatgggtgatagcgtgccttttgtagaatgaaccggcgagttacgatagcatgcgaggttaagttgaagagacggagccgcagcgaaagcgagtctgaatagggcgaatgagtatgttgtcgtagacccgaaaccatgtgatctacccatgtccaggttgaaggtgcggtaaaacgcactggaggaccgaacccacgtacgttgaaaagtgcggggatgaggtgtgggtagcggagaaattccaaacgaacttggagatagctggttctctccgaaatagctttagggctagcctcggaattgagaatgatggaggtagagcactgtttggactaggggcccatctcgggttaccgaattcagataaactccgaatgccattcattcatatccgggagtcagactgtgagtgataagatccatagtcgaaagggaaacagcccagaccaccagctaaggtccccaaataactattaagtggaaaaggatgtggggttgcacagacaactaggatgttggcttagaagcagccaccatttaaagagtgcgtaatagctcactagtcgagtgaccctgcgccgaaaatgtaccggggctaaatagtttaccgaagctgtggagtgcaccataaggtgcattggtaggagagcgttctaagggcgttgaaggtagatcgtgaggactactggagcgcttagaagtgagaatgccggtatgagtagcgaaagacaggtgagaatcctgtccaccgtatgactaaggtttcctggggaaggctcgtccgcccagggttagtcgggacctaagccgaggccgacaggcgtaggcgatggacaacaggttgatattcctgtacccgttgtttttgtttgagcaatggagggacgcaggaggctaagaagtgcagactgatggatatgtctgttcaagcagtgagtcttagtgggagtcaaatgcttctactttcaaggacaagctgtgatgaggagggaaataatagtaccgaagcttctgatgtcacactgccaagaaaagcttctagtgagaaaacaatggcccgtaccgcaaaccgacacaggtagtcgaggagagcatcctaaggtgagcgagagaactctcgttaaggaactcggcaaaatgaccccgtaacttcgggagaaggggtgctgctctaacgagcagccgcagtgaataggcccaagcgactgtttatcaaaaacacaggtctctgcaaaatcgaaagatgacgtataggggctgacgcctgcccggtgctggaaggttaagaggagtgcttagcgtaagcgaaggtacgaattgaagccccagtaaacggcggccgtaactataacggtcctaaggtagcgaaattccttgtcgggtaagttccgacccgcacgaaaggcgtaacgatttgggcactgtctcaacgagagactcggtgaaattttagtacctgtgaagatgcaggttacccgcgacaggacggaaagaccccatggagctttactgtagtttgatattgagtgtctgtaccgcatgtacaggataggtaggagccgtagagatcgggacgccagtttcgatggaggcaatggtgggatactacccttgcgttatggccactctaacccgcagcccttatcgggctgggagacagtgtcagatgggcagtttgactggggcggtcgcctcctaaaaggtaacggaggcgcccaaaggttccctcagaatggttggaaatcattcgaagagtgtaaaggcagaagggagcttgactgcgagagctacaactcgagcagggacgaaagtcgggcttagtgatccggtggttccgcatggaagggccatcgctcaacggataaaagctaccctggggataacaggcttatctcccccaagagtccacatcgacggggaggtttggcacctcgatgtcggctcgtcgcatcctggggctgtagtcggtcccaagggttgggctgttcgcccattaaagcggcacgcgagctgggttcagaacgtcgtgagacagttcggtccctatccgtcgcgggcgttggaaatttgagaggagctgtccttagtacgagaggaccgggatggacttaccgctggtgtaccagttgtctcgccagaggcatcgctgggtagctatgtagggaagggataaacgctgaaagcatctaagtgtgaagcccacctcaagatgagatttcccatttctttaagaaagtaagatccctgagagatgatcaggtagataggtcagaagtggaaggccagtgatggttggagcggactgatactaatcgatcgaggacttaaccacgattgaaaaaagcaaggaaactcggaagagttttgattcttcgatccagttttgagtgagcaatacttactcaattgaatagtgtggtggcgatagcgagaaggatacacctgtaaccatgccgaacacagaagttaagcttcttagcgccgattgtagtgaagggtttccctttgtgagagtaggacgtcgccacgcaagttaaccttatatcaaatatttgatataaggtttttttttgtttaaaagtaacgggatcagcaatgagtctgccaaaaacatggtgcaaaaaatttaggtgacttaaaataactttttttgcgaaaaaatgatacactgtttatgaagagtttttaggagggatagtatgactgaggagcttaaaaaagaacaggatccagtagacaatgaacgtaacgaaacgacgtcggcagttccatttacagaaatcaaagaagtcgcttcaaaaaatattggtcagatgcttcaagacctgcaagcgttcgaaacagcgattgaaaaggaagacattccggagatttatcgaatctacaatggccgcctgcacaaagaattgaaagaaacatccaatcaaaatcatgaaatcgatgagttgctggcgcggaaaatccatgacagttttgtcgctacttttccattcatgatacatgccgatcgaatttcacctacggttcattattataaaataggtgaatactaccatgaacgtccgacaattggcattgatgccagtgttccagaaatctttgtgattcctgctattgatgatgagtggcgtaaatttcaacgcggcaatcgtgatatgctgacagccattgaacaacagatggataatttagacgccaaagccattgcggctcaatccgagattcaaaaactgcaagaggagatcgatcgcattaagcgtagtgaaaacgagttgtcagaatcaaaaggattttttaatcgcggaaaaatcgatgaggaattagaagcattagtccaagaacgaaaaaaagtagaagcgaaacaaaaagaatggtctcgctattcccaaaacgaacaagacgtgcttcttgaaaaagaacgattaatgcagcaatatcacgccttgcgcttaaaaaaggcaatcgtcgaaaaagaatttcgtcaaatcgatcactattttggttcgttgcaagagatgaacgaacgattgcaagctttcttaatgagctatctaggagaggagtcgatcgcagatgaataatgaggaagaaaaaacgcccctaatgaaagaacaaacagaagatgggattcgcgaaacagctacgtcaaagagcgaactggaaataatggaaacaaatgagtgggcaaccgccgctgatgaactaaaaacagttgaaatagaatcggatgagcttgaagcaacggcaattgatcaggaagacttgtaccaacaatctgctgaagaaggccatagcgaaaggctaatcattgactctacagagtctgcagagcttgaaatacctgaagcacctggagaacctggagaacctggagaacctggagaacctggagaaccttatgatgaatactatgaaacgaaagaaagcgatcaccaaagaattgaaagcttgattgaacaagcagaaattgaattagcagatttgcgcttacgcaaagccattatggaagctgattttgatgaattatgtcatcactaccaaacattgatcattggcaaccaggatatttcaattatcgcaaaaaagacgttactggaatactatgcttatgaattcttgaaacccttgcgatcgattggattgatgccaaccgacaactacgatgtttggaaaacaaagcacttcttggtgaagtttcaattgaatgaggaaaaagcaatggatttatattttaaattaaatccgatcaattctcaatatgaatcacagtacttgccgctactcacgatttattctgacacacgagaagtgcgggtcaacgaccatcaaatcttatatctattgcggcaatggtatacagataaaatatttacggtcaatcaattgtcactgtttaattacgatatcaatttactcttaactcattttcgcgcatcttcatttatggtttcaccaagtctcattgataatacgcaagaacttgcagtggatttagagactgagtttccgatcacaacagacattttggaccaaatctttattactacgatggaaaatcaaggctatgattttgtcaaagcagagtatgaagactatgagatcttcttagataaaaaacaacgcttgacgattcggatggctgatgatcggacccatttgtttattgattcagatcgaagaaaacgttccttgttagatttcttcacttcttacgaatttttagttccattagtagtacctagttattcgcattaaacaagcataagagctaaaataatcattaagattattttagctttttttaggagaggagaatgatgtaatgttgaatcgtgcgatcggattttatgagggaatgcctttagataacagcaatgtttttcaaacgaaagatttggacatgccttcaataggagcaaatgatctattgataaaagttgaagccgtatcggtcaatcccattgatgcgaagcgtcgccaaacgacgaccaaatctggtcatttcgtgatccaaggatatgatgcttgcggaatcattgaaaaagttggcgatcaggtcacagaatttcaagtgggcgacccggtgatgtacagtggaacaacacagcgagacggggcgaaccagaaatatcaagcggtggatgcacgcttagtagcgaaagtctctttagaaaatttagcggaatgggcagcattgcctttaacaagtatcactgcctgggaacttctatttgagaaatttgggttgattcctaaagaaaaagccaatcaaggaaaactattgatcatcaatgcaagtggtggagtgggatcgattgccgcccagctggcacattggtccgggcttgaagtatatggcactgccagccccacaaatcatgaatggctagataaaaatggggtagcgcacccactcgattaccattacccgctacaagatcaggttgaaaccacctttgactatattgctgtcttttatgacatttccgattacatcgatcaatttgctcaattgatccgcccatttggtaaaatcggaatgatcgttaatacgcgcggtccattagatcttaacccatttaaaaatatcggagtggacttttactgggaatatatgtttgcaaaaaccgattatcaagtggatttggctagtcaaggagcgatcttaaaaaaaattgttgatctagtcaatgaacaaaaaatccattctacgatcaccacctgttttgaaacaggcctgacgatcgaaaatttgattgaagcaaccgcattagtagaaaaaggcagtccagggaaggtagtcatctccggaggattccatgagtgaggaacaagaattttgggatgattttgcggcagaatatgcagagatccagcaagaatcacaattaacgattgctgaggatctagcaacatttttaaagacaaacggaattttgccaataagctcttttgttgatttagctgcgggaagtggccgctatattccagcgattttacctgatacaaagcgttatttggccattgatttttcagtggaaatgttgaaagcagctagacgttatgtaaaagatcctcaacaaaaagtagactttcgactgcaaacacaagcagagtttcttgctgataagaccacctatcccttgatatttactgcaatgaatccagcgttgaccgagaaagatcagctgatttctctggtagaaaaaagtcgtcgcttattgattttgcggatcgttcggaccaaagaaaatatctttcaaccactggaacagaacgatcacaaagatgaaaagctactttctgtctataagaaatggcttctggaagaacaaatcagtttttctactcatcttttttcttatgcttatgaagaaatcattgatcgggaatttttttaccgctattttcaacaggatattccacagtcagaattgctgcagctaagccattccctttttagagaaaagaaaaaagcaattagtaagacggagatcgattatgaactcctaatcgtttgaaggcaagcggttgtcctgtatattcagggacagctgcttgcctactagtgtctattagcctatccctaaatagagatagccgattgaaccgattatgaataagtaaaggatattcaccatatagaacttgtgttggaatcttttttgttcttgagggagagcttgcttgatcaatttgtaaccaatcaaattcgctaacgaagcaatcaatgtgcccaagccacccacatttacccccaacaaaacagctttcttgtaggttgtaaaaggagcaatcagaatcgctgctgggacattggaaatcacctgagaaagggtgatgctgcctaaaaaggcttgttgttctttttggaagaagggttggatcatttcaatcaacttgtcttgttcgttgatatttccgataatcacaaagaaacaagcgaatgtgactaagagacggtaatccactgaacgaaagagctctttttgaaaaaaatagaccacgaatgctacgatcgatgccgagaggacgaaaggaacgacatgaaagattcccaaaatcatcagtgccattaaaccaagataaagtaccatgtattttttctcaaaaaaatgcgtggtttttttgatgatgagaggggatgctggcaataattgaatggatcctactaacagagttaatgataggacaaccatcatacctgtcgtttgcaaaaaagtagtcaaaggtaaattataaaaagaaaacaagaagagattttgcggattcccaaagggaaataaactgctgcctaaattagcggctacaatcaggtaaactgcgccgagaagaacgcttttttgttcctgaatgcctttggtgatcagaagatacataggtagtaaagtcaggatcgccacatcgttcgttagtaccatcgagctgaaaaaacttaataaaacaatcgttcgaatcagtgctcggagagaatgactcttagagagcaaacgttgaccaatgaaattcaacaaaccggctttttcaagcccattaatagtcagcatgagaccaaacaaggtcaaaatcacttgaaaatcaataaagtggacatcaaaacgtccaaatgaactcgcaacaagcgccaaaaagaaagaaatcgaaaataataaatcgctttggaaaaagaagaatattttttttaacatgcgtgctcctttctttcaaattttaccatggactcttttagagaagcaaagaaatattctcggttttgacatatactgtgaaatcctatcgctcaatatggttgacaaacgaagcgtttattgggaaattagaactagactgaaaaaggagcagaatcgatgaatttgatgcaactattagaaaaaaatcagcaagtccattttcagatattgaccatcttctttcagcatggttcagaaatttcctataaaactcttgcaaataagttatccatttcttcaccgacgctccaaaaggagattcagcatttgagtgacaatctttctgttttccatgcagaggcattgttagaaacaaaagagaatgatcgtttgcatttaacattaccgcttgatttttctattcagcattttttttatgcgtatttatcagaagcggtggattttcaaattattgaatatctctttttccatcgcgaaggatcgacaacgaaactcatgttggatttgacgcttagcgaggcctcgctttttcgtcatttcaaatcgatcaatcacttgttggaggaatttagtcttcaattgaaaaataagaaactgatcggcgatgagcgccaaatccgctttttcttttattcgtttttttcgcagagttatccgttagcaaaaatcaatgaaacctttaagagtccagctattcgaaacttgattcgggtgattgaacagcaactcggcttatcaattgatccacggaataattggaaattggtcttatggtttggtttgatggaagcccgtttcgattttaggagttcccagcaacatgagtcatcgaaaggcctcttaaaacaagtagaaaatgatcctacttttcaagtgctacgaaatattttaggacgttatctcagccgttttgccatttcgtggagtgactacgaagctgtttacctctatttgtttttgatgatggaaggattagtagtcatggatcaccagcaggacactgattcggaatttatgctagatttagccgctgagagtcaagtattgatgaaaacttttgcggatgaatctcttgatatacaagttcattatccagaaatcagtcgttttttagcaatcatcgttcttagagcacgctacttgaagggctcgttgacttcatttgccgattttcctccgcattttttgcggggaaccatcacggaagtagcgaatcaagcagttgaaacattggcacaagccactgggcctttttctgaggagaaacagagaaagctcatccatgatttgtcgtttgttattgaatggttgcaagagaaacaacaaaaagagctgaaaatcggtgttctgctgtctcaaaatcaattacgtacggatgttttgcggcggtttttggccaaacagctctctgggtatccttacatgcaggtggaaactgcacaagcaaccgattatgatctgctgattgtggatcaaccgcagattgccgaaaactatcactacaaaaagctcctggtcttgacaggtgtgatcgatcgttttgaagagcaacggctgcatcaagtgattgatgaaattcgaagggaaaatcttgaaagtgagttggagaagttatgaggattgtcattattggaggctctcatgctggtatagcagcagcccgccatttaaaacagatggatgataaaattgaagtgatcatcattgaaaaatccaatgtattgggctatatcgctagcagtttgaacttagtattagagggatatattgagcgtctagaagattcccgcactgctactgccagtgaattactgtcagaagggatcaatgtgatgctcaatagccgcgtcgtaaagattgcagcggcagaaaaaaacgtttcttttgaaacatcaacggctagttgtgtcgaaaaagacacgatctcatatgattatttgattttagctatggggtccagtaattttcggaatgcttttacggaagaagtcaaagagcacattaccacgtacaaaacgattgcccagtctcgagcagctctaagcaaaatacaggaagccaagaaagtggccattgtgggtgccggtctgataggttttgaattagcggaatcactaagtggacaggataaagaggtcttcttgattgatcggatggatactttgcttttccgctacttcgaccaagagatttctcagattttgatcgaacgttttccagaaaatttacaaatctatctgaacagcagcgtggtcgcagcaaaacaaactacgaacggagagctggcgggaattgaacttgccaatggcacttttttgccagcggatatcgttgtctatgcagtcaatccaagaccgaatgttgacctggttgctgactttctgaagttgaacccagatgggacgatcgacaccaatgaattcttgcaaacttccgatccaagcatttatgctgtcggcgacttagtctcgatcccattcaatcattcagacagttcactctatgtaccgctggtgaccaatgcgtatagaaccggtatcgtcgcggcaacaaatattttgtctgcaaaaaaaatcccttttcccaaaatgcagcgcacagtggtcagcaagctctttggatattttgtgagcagctctggaatcaatgaaacggaagcaccttattatggctttgacgtcgattctgtcacacgtacgttccatgcacgtacgtttttcgaagtagaaaataattttgaagtgacattgaaactggtatttgacaaggaaacacgagtaatcatgggagggcagatcattacaagcgatcgcggcagtttggagatcatcaatacggtctctacgttgatcacatcttacatgactcttgatcaattggctacgatggattactttttcaatccaacgatatcttttccgctgcactttttgaatcaattggccatcgaaggtctcttgaaatctcacgtgaattaaatgtgttatatattaaaagtttttttattcgataaacctacgttaagagtaggtttatctttttttttgcaaaaagccttgtcattaaaagtggaatcgcttaaactaactagagagaatgagaatcgttctcattagaaagggttagtatatgagaaaaatgagtctggccattttgcttctcttgttgatcactgggtctttatttgtgggcgcacatgacatgtctctagctggtttaatggcaggagaagagagtcattggatgatattgctgaaagtacgcgttcctcgtacgattagtctcttgcttgcaggggctgtcatgagcttatgtggaaaaatcattcagcatctgatgcaaaataaatttgttgcagcagacgtgatcggtttgactgacagtgcccgccttgggatcttgatcgtcatgttatggctgcccaatgcatctggactcctgcgaacaaccgctgctttcttattttcttatgcgggggttttgctatttttatggctaagtcgcttgatccctaagaaagatccgatggttttgcctttaacgggtgtgatgttcgggaatgtgattggcgcagtcagttcctttcttgcgtaccgctttcaacttgtgcaaaatgtttcttcctggttacaggggaactttgctaccgtgatcgagggcaattatgaattgatttatctgacactaccaatttttgctcttttgtatttccttgcctatgaaataacgattgccgggttaggagagacagctgcaaaaaatcttggcatcaactaccacgttttacgcttgctcgtatttgcactggttgcttttgccagtagtgtggtcttgcttttagtaggcagtgttccattccttggtgtgatcatccctaatatcgttgctttatttgcaggagaccatgttcgaaacaacctttttctgatcagtttttccggcagtgcctttttgctcttgtgtgatttgctagcaaggattttaatagccccatatgaattgccggtcagcgttgtagcaggaacgattggcggtattagctttctagtcttattgatgaggagaaaaatggtatgagaattatccggcgttatatgttcttgttcatactcatcgggatagctgttggcgcataccttacctacaatacatatggcaattggtccttcgcactgcaattacggggaaagcgaatagtggcctttggcttagtagcaatagctgtctcgtttagcacgatcactttacaaacactgacacaaaatcggtatctgactcccggtatcttaggattggatcaattatatgtgctgatccagacgatactatttttcttcttaggaggaatccgcatgttgagtcaggaaacacctttcgtttttttgttttcgattttagctaccgggacattaagcagtgtcatcattcagaccttttataaaaaagccaataatcaattgtttctattactgatggcgggaatgatcagcggtactatgttcactagtatcagttcatttcttcaagtcatcatggatcccaatgaatatgatttgttgcaagggcgtctatttgcaagttttagcaatgtcaatagtcagcatttattactggctgctggaattattttaattgggctgattggattatcgctattgattccagaattgaatgttatggtcttgggtgttcgaaatgcaaaaagtttaggcctatcggtttcaatgatccagaagagttgtcttttcttgctgtctttattatcggggactgctactgctttagtaggaccatccgtctttttaggatttgtcgtggcaacgattgcctatcagttatttccaacatataaacatggcacattgtttgttggatcagcacttttagggtttttattactagtcggcggccaattttttgttgagcaagtctttcaatggaacacaacgatcaatacagtgattcaatttttaggcggaatcttctttttaggaaaactagtcaaagaaaggaaaggacaatgattgaaacaaaaggaatcgaaaagagttatcaagacaagcgcgtgttgactgatttgtccttgcagttgccggaaaatcaattgattgcctttattggtccaaatggtgccggaaaaagtacattgctttcgattatcagccgcatgttggagcagactactggagaagtttatttcaaagaaaaggagattcgacaatggcgttcgaaagaattagctaagaatctcgcttttttgcaacagagtaacggttttacggttgatatgaccgtagaagaactggtgtcttttggtcggtttccctataatcggggacgatcaacgccagaagatgaacaaatcatttcagaatcattaacacttttatctttagaatcatttcggcaacgctcgatccatgcattatctggtgggcagcttcaacgggtctatttggcgatgattcttgcccaagataccgagtatatccttttggatgaaccgctgaataatttggatttgaaacatgccaatcagttgatgcacttattggagaaattagtcaaagatcatgggaaaaccgtattgatcgtattgcatgacatcaactttgctgccagatatgcagaccatatcgtagcgatgaaagaaggaagtttgttcaaaacaggcacagttgcagaagtgatccaagagcctgttttaaaagaactttatgacttagaagttaagatagtcgaagtggatggacagcgcttttgttattattttaattaagagaccataggaggagtatatgaaaaaaatagtatttagtttggctgtattggtaatgatcacggggttagcaggatgcggctctcaagaaaaaggagagtcaacaagtgcctcaacggctgcagcggcgcctgccgaaatcgaagtgacagatagtaatggcaaagtgactgtgccattttcaccaaaaaaagtcgttgttttcgataacagtgcacttgatacaatggatgctttaggcgtaggagatcgtgttgtaggagctgctacgagcaatatgcctgactatttaaagagttatgctgcggttgattctgcaggtggtatcaaagaacctgacttagaaaaaatcaatcagatccaacctgatttgatcattatctctggccgccaaagagactttcaaaaagatctggaagcaattgcaccaacgatttttctaagtgtagacaacgaaaacacttggtcatcgatcgataacaacattcaaactattgcccaaatcttcggaaaagaagaggaagccaagaaacagttgactgctctgcaaacaagaatcgcgaatctttctgaaactgcagaagccagcaaggaaaaagcattagttgtcatgatgaatgaaggtagtctttctgcctttggtttgggatcaagatatagcattgtttatgatacatttgggtttacgccagtcgatgatacattagaagcatcgactcatgggcagaatatttcttatgaatatttactggaaaaaaatcccgatattatttttgttattgatcgtacaaaagcaatcggtggggatacaagccagagtacgttgactgaaaatgaattggttcagcaaacaactgctggaaaaaacgggaaagtgatcgaattaaatccgcaagtttggtatttagcaggatctgggatcgaatcattggacattatgttgtctgatgttgaaccggctgttgcaaaagattaaaggcttgttatcggataaggatggcttaaatgagaaacagttgcgaatgttggatgttcgcaactgtttttgtattgaaaacaatttattcaatttaaaccaaatttagtttttttcaggtatgctaggttcaaagggaaggagcggattccgaaatgcacaaatatttgctggcggctgccttaggtttagtactgttaatagggggattatttcttcgggtaaacctgatcccgatcgcagactttgagctattgactttggcagaaaaaattacattacaaacagaggtggggctcgcgccaaagtgggggacagtcttaatgggcagcggattagctattttgttgttggttttcatttcctattattggccctccaaaccggggcacaaaaactatttggtcggtgcgggtttacttgcgctttggataatctgcgtaaagatgatttttttcccgcctcaaaaggaatgggtcgaagggacggtcatgaaagtctatgaggatgggtatgcatgttttcagacgaagaaaaacgcggaatcacgttattcatcagattttggtctgtattatttcgaaagcagcgacagttggcagcttcgagaaggacagcagatcaaagttttaacagaaggtgggagtttcataaaatttgatgaagtgtttttaccggtaattgatgttcaaccgttagcggatgtttctcggtctcaagactgaattaaaaaaagaatcacagatttactttacctgtcgtagtaattgatttataattattacgacaggtaaagtaattttaaggaggggatcgagtgatatccagcgatggaattcggggatacaatgatgcaatcatcttatcgattctttccaaagatgattcctatggatacgacatttcaaaacagatacgtgaaaaaacagattcgctctatatcattaaggaaacaacattgtattctgcattcacacgtttggaaaaacaaggattgatccgctcgtatcctggagaagtgactcatggaaagaaacgcacctattatcaaatcagtgaggcaggaagagaatttttagaagtaaaaaaacaagagtggcagcaaacaaaaattgttgttgagcgctttttacaaggaggagcaaaatgaaaaccatccgggattatttagatagtttgtttttgaatgtacccaccacgccagaaacaaagaaagccaaagaggatttggctgcgatcatggaagaccattaccatgaattgattgaacaaggaaaaagcgagcatgaagcaatcggggctgtgatcagtgaatttggatcaattgatgagttgcttcaagaactgcaagtagcgcagtcagaagatactgcagaagaagcctggttagatgctattacaatcgatgaagcctttgatttttgggggaagattcgccgttttgccttctcactttctttaggtattgcgttatgtatcgcttctcttggaatatttctcttttttgccaatgaaatcgatagtggcttaggactattagtcatgttcatgtttgttgcattgggcgtgggctttattattacctccggcttgaactattctgcatcaaaacgaaaattaaacgatcgtccatttgatcaagaagtaaaacaagaggcgcggaagcaattggaagattatgaaaagagttttcgatttggtctggtgctagggatttctgcatgtattctgtcggtgacaccctttttcttgatggaagctattctttacattcccagtggtttagctttaggactgttttttgcggcagttgcattaggagtattctttatcgtctatgtcagtatcatccgcacaggatttgccaaaatggccgatggcgtttactttatttctaatgaagatgaacccggaccacgggcagcgcaacacatttatggagaatccgcaggaaaagttcgcttttttaatacggtttattggccagtgatccttgtggtttacttcctctggtcattttcaacaggaagctgggcctattcatgggtaatcttcatcttgggtggggtttttcaagatttctttttgcctcatcagaaaaataagcgctaaggaatttcttgaaatagtttttgataaacatctgaaagatccgaggttctgctagagcagaagaggagtccttcaggtgtttttcttatcggtttggacaaataaaaacttttcactttgatgaatttgacaaagtgaaaagtgacttaaagttattgagaaaatatccttgtaaatgagaatgagtagccttgagggtataattgttagaaaagtgaatctatttattttcccagaaatcattttaaaatgaaagtgaaacgctcatttatgaggagaaattcattttgtttaaaaaaatgcaaagagactattgcaattccactggctttagactaataattaagagagattattctcaaataataattctaattggaggaatcgctatgtcattaattggaaaagaaattgagtcatttgaagcacaagcttatcacaacggaaaatttatcgacgtttcatctgaagatttcaaaggaaaatggaatgtggtttgtttttacccagcagatttttcatttgtatgtccaacggaattagaagatctacaaggtcaatatgcagcattgaaagaactaggaactgaagtttattctgtttcgacagatactcactatacccacaaagcatggcatgatcactctgatgcaatcagcaagatcgaatacattatggttgctgacccttctcacacgatctctcgtatttttgatgtactggatgaagaaagtggcctttcgcaacgaggtacttttattatcgatcctgatggcgttgttcaaacggttgaaatcaatgcggatggaattggacgcgatgctagtggattgatcgacaaaattcgtgctgcccaatacgtgcggacacatccaggtgaagtttgcccagctaaatggaaagaaggagaagacaccttaacaccaagtcttgatctagttggaaaaatataggaggttgacatggctttagataatggaattaaagaacaactgaaacagtatctggcaatgctggaatctgaaattgttttcgcagctagtcttggtacagatgacgcctcacaaaaagttcgtgatttcttagaagaaatcgcagaaatgtccgaacgtattacgatcgaagaagtaactgcagatcggacacccagctttacaattatgcaaccaggtatcgacagtggcattgcttttgcaggtcttccactcgggcatgagtttacttcatttattttagctttattgcaagttagtggccgggcgccaaaggtcgaacaagcgattcaagaccgtatcaaacaaatctctcagcctttgcattttgagacatatgttagtctgacgtgccataattgtccggatgtcgtacaggcgttgaatatcatggctgtcttgaatccgaatatcagtcatacgatgatcgaaggtggtatgttcaaagcggaagtagatgccaaaaaaattatggccgtaccaaccgtctttttgaacggggaagaattcgctagcggtcgtcagacgatcgaacaattacttgaacaagctgctggtccgactagcaaagactcgtttgcagataaagatctgtttgacgtgttggtcgtagggggcggtccagcgggtgcaagtgctgctgtctacgctgcccgtaaagggatcaatacaggcatggtggtggaaactttcggtggtcaagtgatggaaacattaggaatcgaaaacatgatcggtacaccttacacagaaggaccaaaattaatgcgtcaagtggaagaacatgtcaatgagtataatgtagatgtcatgaaaggacaacgtgccaaagatatccgcaaaaatgaattcgtggaagtggaattagagaatggtgctgttttgaaaacaaagacagcgatccttgccactggtgcacggtggcggaacattaacgttccgggagagcaagagtttaaaaataaaggggttgcttattgccctcactgcgatggtccgttgtttgctggtaaagaagtggcagttattggtggcggtaattctggtattgaagcagcgattgatttggcaggtatggcaaaacatgtctatgtattggagttcttgccggaattaaaagcagaccttgttttacaaaaacgactagcaacattggaaaacgtgacggtcatcaccaatgctgctaccaaggaaattgcgggttccgatcatgtggagcagctgacttatgtggatcggcagacaaatcgtgaagccactttagctgtggaaggcgtctttattttgattggcttgatgccgaatacagaatggctgaaagatcgagtggctttgaatgaacgcaatgaaatcattgtcgacaaacatggaactacagatcttgctggagtttttgctgccggagattgtacagacagtgcctacaagcaaattattatttcgatgggttcaggagcaacagcagcgttaggcgcatttgattatttgattcgccaataatcaaatgcggactgatcctttaaataggtacaaggaatgactgcaacgccgtttaccaatttgattcatttttgatccatgatcattgcagctgatggctgaacttcagtcaaatagttgccagttgattgggtctcgatggatcgatggcaaatggctgttgcagtttttttgtcctgaaaataacgagaaatctctaactaaaaaaggcagcgattcaatgagctgtgagaaaacaggggaattagtcaattgcttaaagatgtttaagaataattaaagaaaaacacaaaattgcggaattcagttgtcatcatgaggaacaaaaggtaacattcaggatgaataaaaataacggataaccttgttaggtgaggctcctatacaaacataagctattgcgcagaaacgtcgaaagacgccaatgtgtaaaacaggaattgtcggattaaggctcttcataaaatagctaagaagaaataaatactactaatttgcttcttctttacgttgtatagtgccaaaactcggacgatgagattgcttgcgaagtcgaacgtcttgagagaagtttggctttttttcttttcttgagtatgtttcaaaacgtaaatggataaaataaataacgtctgaaatcacctgctccaagggaaggagtggacgatatgagtaaaaagagaaagatcgattggttacttatcacagcttatttgctgttgagtatcatcggtcttttaatgatttatagtgcaagttcttaccggttgatgactgctgggggtgcaccggccgcgttgttccagcgacaactgatttttctgctgttgagttggggaatgattcttttgattcaaaaaacccgcgtcgaaattttgttaagcaaaaagttagctgtgggactattggcctttggcattgtcatgttactgttggcctacctgccatttttcggggtatcagttaacggtgctcagcgctggatttcgatttttggcattcagtttcagccttcagaaataacaaatgtcggtatgattctttatttggcaaactattttaaggacaaacgatctttcaatgaattaaaaaagccgctctttctcttatttctatgttgtgggctggttctaatgcagcctaaagttgcaggagtaatgattttactatttttggcttttgttatgatcacgactgttcaagtgccagtcaaagtcacattcctgctatttactgcactgatttccagtttatttcttttaggaggtgcggtcctctttttaggacaacacggctggttaccacaatacttcatgcatgtatacaaccggatccaacttgttggagatccattttctgacccatatggtcaaggtttccaaatgattcattcctattatgcattattcaatggcggattaagcgggttgggtttaggcaatagcatcacgaaaaaagggttcttacccgttgcggagacagacttcattttttcggtattggtagaggagcttggccttttggtagggatttttgtaattggattattatttctaattgtgttgcgcctgtttattcgttcggcaacagctattgattcacaaataggcttgattctattaggaactgccacattgttgttattgcaaacaagtatcaacatcgcaagtatcttagggttaatgcctatgacaggggttcctttaccatttattagttatggtggctccagttactttattctttcgtttgcttttggtatttgcctcaaattggaaagagggagggaagcaaatgaagtacttcaaacgacatgaagtgaattatgcactgattctaccggttttcttactttttttattgagtattgcggttcaatatggtgccagtgtgctggatggcattgatccgggaccggttgttgtgcggcaactctttttttgcatcattgccgcaatcgcattgtttgcgggcagtttactttcgacgacttttttattgcggttctctggcatcttttatgttctttctctaggattgatgacattattgtactggttttatgatcccgtcatgtttgagttgacccatacaaaacgttggatccgaatcggccgtttcacattgcagccttctgagattatgaaattggcttttgtattgtttatggtgtatctcacactcttatatgaaaaaagacagattcagcgaacaatcaaatctgactgtttctacattctaaaaatagtgctttatagtttgccgacttttctattgatgtatatgcaacgggactttggtactagtttggttttcatcgtaatgctcggcgcactatttgttatttccggtgtccattggaaactgttgacagtaatttttacggtattggctgtggttggcggactgttattgctattagtctttactgattgggggaatacgatgttgtttcgattgcattttaaaccctatcaattggatcgagtcaaagcttgggcagatccttttgcttatcaagactcgattgcttaccaacaagtacaaagtatgtgggcaattggttcaggtggtctcctcggggcaagtgacacgcacattcctgtctacgttcctgtgcgtgaatccgatatgatctttacagtcatcggagaatcatttggatttttaggcagttcattagtaatttttctctatttttatttgatttatcagatcatttttgcagcattgcggacaaataataaagcctcggtctatctatcgatcacgtttgtttttggtttggtttttcaaatttttgaaaatatcggggcggcgattggattactgcctttgacgggtattccactaccatttctgagtcaaggtgggacctcgctgattgcagttggtctctctttaggcattatttttgggctggagaaggcgtatgccccgaaaaaaactttcccaataaattaaaggagtttactaaaatgttcaatcgaactcatcggatgacggtcagtcttagctttattgcattgttttttttattgacgatcctagtcttgcatcagccacactggtttcaaaggatagaccgactcttttggaatttgcctcagatgcgcactgctttaggagaccaaatcatgttgggcatcgcttcgactgctacgatcctaccaataactggtttatttctgcttttgggcatctatttatggaaaaagcagcaacgagtttgggcaatctggggaataggaaatctgattgtagtgagtggtatcggtcaagtgatgaaatggctgattcagcggccacgcccagtcctagaagctgggatggttcgcgattcacacagctttcccagtggccataccctgctagctgttacactggtgactacctgtttgcttttcactcgatttttgtttaagaaaaaaggtctgttggctatcctcggcggctctttcatttttttagtaatattttcccgcttttatttaggcgttcattacccaagcgataccctcgcaagtatctgtttagcaagtgggatcacattgatgacttatgaatggactgaaaggattcttacgagtaaaagtaacaatttatccgataaattcaagcaaaggagaagaccatgacgaatggaaagaaagtttggctgacgcttttggttagtttaacactgcttgtgaccgttggaacagtctatgcgctgcgcatcgttcttcgtgcagaacaaacggttcaaaccatgcacgcaccgattaaagggcgagaagcaacagtaattgaagaggtagaacccctaagtctgctccttttgggtatcgcaaatgattccaagcgaaaaacagactatcgtgcgaacacgatcatgatcgtgacattgaatccaaaaaataagcggacatccattacaagtattcctcgtgatgcttatgtagagattgttggtaaaggtttcaaagataaaatcaatcatgcccactcatttgggggcgccgaaatgatgatcgcttcgatcgaacaatttttacagatcccaattcatcattatttctcgatcaatatggatggcatggtagatcttgtagatgcgattggcggaatcacagtttacaacgattttgagtttacggctgagaaaattcattacccagagggggagcttcaattagatggttgggcagcacttcagtatactcggatgcgtaaagatgatccagaaggggattatggccggcagagacgacaacgacaagtgactgagctcctcgctaaagaattgctgtctctgtcaagtttgttccagtaccaagagctcatgtcgatcgttggagaaaacggccaaacggatctcacttttcagcagatctcacgattaataacgagttaccagtctaccctaacaacagttgatctctatcaaatacaggggacaggctttacgggagatggattgcaaggagaagcagggatttcttaccaagcaatctctgatgaggaacgacagctagtgatccagcgattacattctgaattggatatgcaaacacataatgaaccggcagaatagatgatgttgacaattcgatcatagatatactaaaataaagaaaatcgttcaaaaaaagaaagaggtctcttgatgagtgtcttaggtatctaaccagcaaatttaaacaaataaacaatactaagtttatttgttgtgcctgcagataccgatcaaaatcgttattgataaaaacaggtgatggggaactgtcaccttttttgtacactttttttgaacgtggaggagagacgtttcacgggcacaagaaaggacctcatatgaatatcccacaagaaactgaatttgacgcaattaaaacaactgttagtcaacgaatccttagtgattatggcaagcaacgatttgccgaacaacaaccggcctcttctattcattccgctagaaaaagactagcggagacaaaagaagcaatggccctcttaggctctgggcaacaagtaccattcatgggcctgtctgatattttgcatcatacgacaaaaatcgaaaaaggcttgattttagagccgagagaattgatcgattatggagactttttacggtcttttcgattgatccgtcagatgtttgaaaaaaaccagtggcagacaccgcggcttactggctatgcgcaaggattaacggatttttcagacaccgcacaaacaatttttgacaaaatccgaaatggccggattgacaccgatgccagtcgtgaacttaggaaaatccggggacaaatagccaagcatgaagcagaattgaaaaaagtcttttcaaagtttttgcaagatccacgactattacaagatgcacgaatcattcaaaaaaatgatcgctacacactacctgtgcgctccgaatttcaacatcagatcaaagggcagattattgaacgctccaataaacgggcaacagttttcattgaaccagaagcagcgattcgcttgaacgatcgcttgataatggccaaagcagaggagactgccgaggagtatcaaattttagctggattgactggactgcttgcagaaaacttaacagaaatttttacctgtctggatgtattggttgaattggacatcatctttgctcgagcaaaatactgtcgtgaaattcatggtgttccgctagaaatcaatgaagcagaagtaatcgacttacaggaagttcgacacccattgttaggagcagcagcagttcctctgtcattacaacttggttacgatgctcgctgtctggtgatcacaggtcccaatgccggtgggaagacggtggtgttaaaaactgtggcactggtttgtgtgatggcgcactatggtctctttccttcacatgctgggggaagtcaggttccatttttgaaaaatctgtggatggatattggggatcaacaaagtttagcgaacgcattaagtaccttttcgggacatatgaacaacattgcccaaatcgtcaagcatgcttcacggcaaagcattgtattgctggatgagatcggcagcggaacagagccaaatgaaggagctgctttagcgattgcgatcatggaagccatctatcattcaggtgcgcttttgattgctactacccactatggggaaatcaaacagtttgctattgatcatcaagatttccatacggctgcaatggcttttgatccagaaacattgacacctaaatatcggctgctttctgatgctgtgggtaccagtaatgccttttggatcgcagaaaagatgtcagtctctaaagaaatcgttgctaaagcacaacgatacttagaaacgaaacagtatccaacggaaaaagcagtatttaaaggcatccagaaagaacgacagcaagtatccgtggctactttaaaaaaaggcgatcgcatctcttacacagagacaaatcaaacgggcttgttttatgcctatttagaaagcaatcaagcacagattttgctggatgaatcattggttatcgttcccactagaagagtcaagcttctgatgtctagagaagaattatatccagcagggtatgacttggagagtctgttccattcatttgcagaacgcaaatttaaccgagatatcgaccgtggatcgaagaaagcgcaaaagaaattaagaaaacaagcacaggaaaggcaagcatttgcgaaaggcgacggcgcgcaaacgtaattgatcgcaggaaataagctagcgaagataactttcagtaaaaatcaagctattttgcaacaatacgcaagtgtttccaataatggtagaaatagcgctagaaatgcaataaatatataggatgctcacagcaaaggtccgaaagaggggaaagagatgatagaaacaacgcgtttaattttaagacattggcagaattctgatgccaaagagttgtttgagttggcaaaagatcctgctatcggcccaagagccggctggtcgccgcatcaatctgtggcagaaagcgaaacaattattacggatgtttttaacacgaatgaaacgacttatgctatttgtctgaaagatggcatgccgattggcagtattggtattatgccaatcagcaaagaatttatgctcccgcctgcagttgaagtaggctactggatcgggaaagcttactggggacaaggctatacagtggaggcgttgactgcgatccttgctgatcagtttgccagggaaccgaagctaacggtttgggcaggctattatgatggtaatgaacaatcttggcgcgtccaacagaaatgcggttttgtctatcagttaactcaaacagtcgaggttcctctgttaaatgaacaaagaaaagaacactttactagcctcacgtataaccaatggctagctgtctcagagaacggccaaggaacagcaattcaaaagaaagaaaacaattcatcaacgattcactatagcaaacaccttccagaggacccacaacaaatcctttcgttgtatcaagatgctggctggtccttgtatattcgcgaaccagaagtcttgtgggcagcacttcagcaatcccacatgatcactgcttggcagcaagagcgcttagttggtttggtgcgaggaataacggatcagcaaacgattttgtatatccaagatttactcgtattgaaagaattccagcggcagggaatcgggcaaacgttactaaaaaaaatagtaggagactacccgaaaattcgtcaaaaaattttattaactgacgatacgaaaaaaacgcgggctttctacgaagcttgcgggttccaaacagtggagaaaagtcatgcggtcgcctttttatatgccgctaacaaagttagtgaaggtctatcttcctaataaataataggaaaagaagtaggaaagtaaacagggaagtaagtaggtaaataagtaagaaaagaagtaggaaaaactagtggcataagtcttaaccaagaagacacactcgatcactaaagaagccgtcctctggatgtcgtcttataatggctgatcttgactgttgtgatcgaaggtttatcagactgatgccactagtttttttgatcgtagcaaggacttgtctctagcaaacctcttgtttcatttttctagcgggaactcagaaaacgtcaaatttaataacattaatgaaataattttattgaaattttgtttttgtgacaaaaaaatcggttaagacatagtgaatatgctaaactagtaatgattgtttaacaaaaaaacaggaggtttttctttggagctattaaaaaagtcgaaattatttgcagtacttgtgtttatttgtttggtgggactaggcatatggatctattcaaatattctgtttgtcttccgcccgctagaagccatttttgctagtgtctttttacccgttttgatttctgtatttattttttatatctttttgccttttttcaatttgatcaaaaaaaggagcagcaatcaacatctcgctctttatgtcacattgcttctgatcctctttgctgcttatttaatcattcaggtgatcggtccggcactgattaacgaaatggcacgttttatcaatcagattccttacatcatcaacagaatcattgacaatatcgatcattcttcttttgaggaattatttggtccactgttagattcattggatatcaaccaaatcagtaatctcgctgctcagtttatcactggggctacgaatagtctgacaagtttggtagcaatcgtctctcattcagcgattgttttgttcacgattccgttgctattggtttatatgtttaaagatggacataaggttcctgatcttttggtctcgaaagcaccaaaaaaaattcgctctcttattctgcagttgtgtcaagattttcatcaagctgcttcagcatatattagcggaaagctacttgtctgtttgtatgttggcgtcttcagctatctaatctttacatttttaggcttgcaaaatgccttgttactaggcttaatctgtggtgttctagatatcattccgtattttggtccttttatcggcgcggcaccagcattcttgtttgctctgagtcaagatatgaaaacagcagtcttgttagttattggcattacgatcattcaatttggcgagtcgtatgttgtttcaccaatcgtcatgaataaagtgctacatatccatcctatcattgccgtcttcttattattgatcgccgggaatttattaggatttgtaggaatgatcgttgcgctgccggtctattcgatcgtgatggccatggcaggcactttgacccgctattatcaacagcaaaaacatgtaaagcaagaaggaaaagaaaatgaaaatcgttgaatatgcaggggacaaagaagattttgtactagcaaaaataatacggacctcttttgatgcagataccgcatgccatttgggggcagacaaacgagacggtccatctggctatcataatggagaattattgaaacgagtgaagcaagatccagatctcagtctttacctgctgcaagaaaatggcattattggtttgattgtggcaaatcctagtaaacaccagatttgctacttttgtctcgaccctgattttattggtaaaggggttgggactcttgcttggcaattatttgaaaaacgatttcccgtcgattactggatactagaaacaccagcatattcccttagaaaccagcgtttttacgaaaaaaatggctttaaaaaaattggtgaaaaatggtatagtaaagacctatcctatatctaccaaaaaaaattttgataaaatcgcaaagtgagggaaggctatcatgaaagtcttatggaatgaagagatcgttgatcgacaagaggttcaaatcgatatcgaagaccgcggctaccagtatggagacggaatctacgaagttattcgcatttatcaagggaaaatgttcatggccgaagagcacttgcagcgactagagaacagtgccgctaaaataaaaatgacattgccttatgaaaccaccattctcaaagacagattacgttcattgatcgacattgagggaatcactgacggagaagtgtatttgcaagtgacaagaggggttttaagtccgcgaaatcatgtttttcctcctcaagggacgataaaaagtgtccttactgcaaatgttattccattccatcgtccagtggacatgcagcgtaatggtcttcaagccacattaatccctgaccagcgttggcttcattgtgacatcaaatcattaagccttttggggaatctgctctctttagaggaggctcggtccaatggttatgatgaagcactactgcatcgagagggcttttttacggaagcttccgcttcaaatttatggtttgtttccaaaggaacggtgtatacgcatccggatggcaatctggttttacctgggatcacaaaaatgaaagttttaagcttgtgtcaggaattgaagctaccagttaaggaagaagccgttgcgattgatcgattagcagaatttgatgagtgttttattaccaattctgtctgggaaatcgtgccaattgttggtatcgatggtcatccggtgggaactggacagctaggagctgtgactgctaaactacaacaagcgtatattgaagcaaccaaaaagaactgactccaaacaatacacccacctgagatagaaatccccctaagagttagctgactagcgacctcttagggggattttaccatttagtagatgttagttgaaataggaatcagagacgtgctagcagaacacttagttttttcaagtttctgtttcattcagccacgtcgtttactgtgcttagcaatcaattgttgggcgtttcatgttgtcaaaaatggtcttaccagtcttggggattccataatttactgtccaactcgccttgcttcagttgaattcgtgtttgttgttgtgtcaaaagcacttctaattcttgcaagaaggctttctcatgataattgagtgtctcctcggtttgttcttcaatcaaggagtggatccatgcctcattcattcgtaagcctccatttcagcaagagcttcatctaattcaagtaaggtttcctgattttggataagttgatcgagaagaggagcgagttttggattttcagctgtcagtgcttctagtctttgaataaaccactgttgtttggcagcaaatgaaaagggggcttccattgtcagcagctgctgatagtcgatcacaaatcgccgtttctctttttctgttttatacattaactgatcgagaacgagaaccggtaagatggtcatttggtatttttgtgccattaaagttagaggtcgcaaaatttcagaaaaactggctccttcttttccacctagttgaaattctttggctgcaacgcctgtagaaagagcaaagccgatttctttatttaataagtagggtttggctgcctcccaaaccgtatcgatccaacatttcatttttgcaggaacttggtaccaataaagggggaactggaaaatcagacgatcgatcgtttgcaatcgttctaactcaatctctaaatcaaaatcccccgcaactttgtcaagcatatgaacactgacattaggcatcttggcactttcgctaaaaaaacgttgagataaagagtcgtcataggacggatgactggcaataactaatgttctaatcataaagaaaatcaatcctttccctatagatgtaacataattctgccaaaaacggaactactctgcttttaaattagaaggataaatgtgagagaggctaaagtcattattggttcagtgaaatctttactgacttgaatcgtccgtctttttttgctatactgtttagtgaattgaatagaagacagacaaaggttgagcatttcgatgcttcaaggatcacgttctccaaggggtgaggagaacattcttgaaggcgtgccgatcttttttttgaaggcatacttctttacgaggtatgccttttttgtgtctatttttcaattgtcttgtttactttgacaataggagggatattttgatggaagaggcactgaaacgcctgcaagaggcagaagcctataatcaacagcagatgcagcaattgcaacgggcgctgtctgattacgaagaagagaagcaggaggaactacaacagcgtgtacttgaattgagagcagcatgtctgcgtgaacagtccgcacttgaacaacaattacaacaaacgttgcaaaaaacgacggaacagatcgaagcagagaaacaacagtttattgcagatctccaagaaaatgttcgtcgctgtcaagaacaaatggtcgatcagatcgttgaaggagtgatccaaacttatggcagtcacgaaactaagtaagctgaccttgatcgcccccgaaaaccatcaagagcggttattgaaaaaactgcaaagcttacagatggttgagattgaagatgtctttgaaaatgcagaaaatcaaccatggctcaaagaattttttgctgattatcaacaagagacagcgactagctacgcagagacgcttcgcaggatccaagaagcaatcttgttcatccggcgacaaggcggaagcggcaaaatacgagagtggcaacgccaatctttacaactgcctgcatttgaagactcctttcaagagcaaactgtcttgacgcttgtcgaacaaattgaagagttgcagttacaatggcaaaaaaatcatgaagcgatgcaagccgcttctcaatcagaaacctgggcaatggaatggcaaaacctggatgtttctctcgaagaaaaagagttggcatttgccactttcttttgtggcagtgttgaaagttctcattgggaagccatatcagcgaccctcaaacaacttgatgctgtttacctggaaatgatttattcggatacaaaaaagacaaatttcagttgtctttacccgaagaagctttctgcagaagttgagaatgtttttcagcgatatagtgtaaaaaaagaaaatacggacagtctgaaaaaaccaaaagtgctgttgcacgaggcccaggcaaaactgcgagagctagcggatcagcgaaaacagctggcaaatcagattggcacgtataaaactaagattgcttgtttgcagcaagcagaagaatattttttgacaaaagaacaacgaaaaatggtacgaaaacgattggtcactggcaaacatcatactgttttgagaggctgggtcgcgcaacaagatcaacagactcttgaaaaagagctggcagattcttttaacggcgaagtctattgctcattcaatgaacctaccttagaagaattgactgcgaatcaagttccagtcaaactgcaaaatgcttcgtttatcaaaccatttgaaatgttgacggaaatgtatagtttgcctaaatatgatgagatcgacccaacgccttggatgacacctttttattatgtcttctttgggatgatggttgctgatttgggctatggcggattgatggcactggtgaccactattggcctgcactttttccgtttacctaaagggacgaaacggtttatgaagctgtttcaaacattatccggtcctacgatgatttggggattgatctatggctcgtttttcggagcgactttgccatttcatttgttatcgccagcgaaagactttatggctatttttggattatccatgatttttggagggatccaattgtttacaggtctttatttggccgcgaaggaaaatattcgcaagaaagattttttagcagctgtcaatcaaggcttttcttggcaaggcttgctggcgggacttttggttgctgctgctggaaattggctctttaccgccccagcactcgtcacattaggattgattatagcaggacttagcgggctgctgatcgtgattgtgccgatcattaaaggaaagtccaaagttggcggttttttcatggggatctatgatctctatggggtaacaagctatattggcgattttgtcagctatagtcgtttgatggcgttagggatctctggcggcagtatcgccgctgcctttaatttattagtgggctatatgccgccggtagcacgattttctgttgggatcattctgttagtgatcttacaggcgctaaatatttttttgtcattactaagtgcttacgtgcatgcagcgcgtttacaatatgtagaattttttggcaaattctttacaggtggcggccgggcgtttgacacctttaagccgagtgaaaaatatgtcgattttgaaaaagaaaacggaggaaagaaagatgattgattacttgattaataacaacggtggaatggtatttgcgattataggaatgggaatcgcaacgattttttctggaattggttcagcaaagggtgttggaatgacaggggaagcagctgcggcgttgacaacgaatcaacctgagaaatttgggcaggcactgattctacagttactgccaggaacccaaggtttgtatggttttgtgattgcctttatgatctacggcagtttggcagcagagatgtcgacggtgaccggaatggcctatttgatggcttcattgccggtagcttttaccggattgttctctgggatcgcacaaggaagagtggccgcatcagggattcaaatcttagctaaaaaaccggaacactttttcaaaggagttatgttctcagtcatggtggaaatgtacgcgatcttaggcttcgttatttctttcctactattagggtccatttaaaggaggcgacaagcaatggaggcaatggatgccatcgacaaaatgattgctgaactagatcgggaagcaaaagaaaaacggcaagtaatcgaaacggacactaaaacaaggatcgatgccgattttgcagctgcctggtcccaaaaagaactagaaatcaagcgccattcagtagaagcaaaaaaacaaatcgaaaaaaactatcagcaagacatgaatcggcgaataaaagcagccaaacaagaagggattaaacaagctcataaagaactggagacattattcgcggcagcttatcaaaaaatgaatggattggcgcctgatacagtccaacatctggcggaaaatacattaatgcaattacccgtttcgggagaagtaatctttcgttgtggacagcaacagtcagcaagtttgacaaaagattggttgactgctgtcaatcaaaggttgccttatcttgcaaggatgggcaaaccattggagcaagcagggtttatagtagaagacaatggcgttttctacaatttcacctaccaagctttactagaagaatacaaaaatgaaacgagagaacattggctgaaagtgatccaaaaaggagggtaagctatggcgagctatcatcaattgaatccactgattcggatcaaagagacaaccttgcttcaaatgcaagattggcagcagctgattgcagcagagtctatggatcaagtaatggcaatcttgcagcaaacgaattatcaacgttatctgggcgctgatttttccgaaaaatttgaggggtatctggatcaagaaatgctgacaaccatacaagaattagcagaaaacgttccagatcctgatgtgcttcgtttgatcatgctgccgtatacctttcataatttgaaggtattgaccaaagaagatgtaacagggagagattatagcaatttactgatcgaagatggattctatacgatcgatgaactaagaaatgccatccaaacaggatcttcggaaagtataccgtctaaagtcattgaaacgatccaagcagtaagggaatacttagaaggttctgctgttttgcaagggatcgatattatttacgatcgccgctttttacatgagcaacgacgcctagccgaaaaaataaatattccagcactgacacatgcggtgatcacaggaatcgaccttacgaatatcacgattgctgcacgttgtttgctgcaaaaaagatcaaaaagttttatggcggctgttttagtcagtgtgggaagtattcccaaagaagattatctcgcttttgcggaaacctccttcactgactatctcgcctttttgaaacaaactggctatcaagaagcgctactgccgctattacaagagaccacgatcgattttgctgcattggcactggtgaaagatgacttagttactcagcagttcgtagctgctgaagcgttgggaccaatgccattactcgcgtttttaaatgccaaaacattggagattcagaacttgcggctgattttggtaggaaagcgcagtggcttcacagaagaagagctgagagagaggatgaggtactatggcagctaagattggtgtgatcggcagcaaagaatccgtgttaccttttcagctgtttggctttcaagtgtgttacgcaaccgcaaaagcggaagtgactcgtgcctttcagtgcttagtgaaagaagagtatgcggtgatttacgtaacagaaaaatgtgcggcattgattccagaagaaattgccaaataccaacagcaagtttcaccagcgatcatcttgatcccagattacgatggatcccaaggggtagggctgaaaatgatccaggaaaatgtcgaaaaagccgttgggcaaaacatactatagaatggagctgatgttgtggaaacaggaacaataattaaagtgtcaggtccgttagttttagcaaaagatatgggccatgcaagtttagaagatatttgttatgtcggtgatctgggggttgttggagaaatcatcgagatgagaggaacgatcgcttcgatccaagtttatgaagaaacgtcaggtatcggaccaggagaacccgtccgaacaacaggagaaccgctgtctgttgagttagcaccgggaattatgtctcaaatgttcgacgggattcaacggccattagaaacatttatggagctgacccaaagtaactttttgaaacgaggggtccagctgcctgcattggatcatgagaaaaaatggacctttgaaccgaccattgcggtgggaacggaagttactccaggaatggttatcggggtcgtccaagagacgccattgctcctccacaaaattatggtgcctaatggcgttacaggacgggtcaaagaagtttttgctggtgattttacgattgatgaaacggtttatattcttgagacaccaaaaggagaacgctccttttcgatgttgcaaaaatggcccgtacggcacagtcgtccagtcaaacagaaattaaatccggtagagccaatgatcactgggcagcgagtgatcgacactttctttccaatcgcaaaagggggagcctctgcggtccctggccccttcggtgcgggaaaaacagtggtccaacatcaaattgctaaatgggcagatgtggacttagtggtctatgtaggctgcggagaacggggcaatgaaatgacggatgtaatgaatgaatttccggaactgattgatccacgaagtggcgaatccttgatggctcgtactgtactgatcgcgaacacttccaatatgccggttgccgctcgggaagcttctatctataccggaatcacgattgcggagtatttcagagacatggggtattctgtagcgattatggccgattccacatctcgttgggcggaagcgttgcgagaaatgtccggtcgcttggaagagatgccaggtgatgaaggctatcctgcctatttgggcagtcgcttagccgagtattacgaacgatccggtaaagtgatttgtttaggctcggaacaagaagggagcatcactgccattagtgcagtatctccatctggaggggacatctccgaacctgtcacgcaaaacaccctgcgagtggtgaaagttttctgggggctggatgccacgttagctcaaaaaaggcactttccctctattgattggctaaaaagctattccctgtatgagaatgaaatgggcgcttatctggatcgtcagttgcaagtggagtggtcgaaaaatgtgactacggctatgcggatgctgcaaaaagaagctgaactttctgaaattgtgcgtctagttgggattgatgccttatcggataaagatcaactattgttagagatcacgaagtcattgcgagaagattatttacaacaaaatgcttttgatgctgttgatactttcacttctcgagaaaaacaatttgaaatgctgcagaccatcttactgtttcatgacgaaggtcaaaaagctttagaattaggcgcctatttgacagaaatctatcagggaacagaacgtctgcgagataaaatcgctcgcatgaaatatcttccggaagatgatttagaaggaatccgcaaattggaaagcgagataaaagatacgatgaaagaaatcttgcagaaaggagatcgtacggatgatcaaagaatataaaacgatcggggaagttgtcggtcctttgatggcggtcgatcgtgtctcaggagtgaaatatgaagagctgatcgaagtacgtctgcaaaatggtgaaattcgtcaaggtcaagtcttagaaattcaggaagataaagcactggtgcaaatctttgaaggtactggcggaattaatttacgagaatccagtgtgcgcttcctcggacatccgttagagctaggtgtttctgaagaaatgattggccgggtttttgatgggttaggacgagtcaaagatggtggttcagaaatcattgctgagaaacgaatggacattaatggggaagtaatcaacccgatggctcgagattacccagatgaatttattcaaactggcatctcttctatcgatcacttgaatacgcttgttcgcggtcaaaaattaccgattttttctggttctggtctgccgcataaagaattagcttctcaaatcgctcgtcaagcgcaagtgctcgacacagaggacgactttgcggttgtttttgcaggtatcgggattacgtttgaagaagcagaatatttcatggaagattttcgccaaaccggagcgattgatcggtctgttgtctttatgaatttggcaaatgatccggcaattgagcgaattgctacgcctcgaatggctctcacagctgccgaatatttagcttatgaaaaagggatgcatgtcttagttatcatgacggatatgaccaactactgtgaagcgttgcgggaaatatcagctgcccgtcgtgaggtacctgggcgccgaggctatcctggttacctctatacgaatctttccacattatacgagcgagctggccgcttacggggagtgaaagggtcggtgacccaaatccctatattgacgatgccagaagatgacaagacccatcctattcctgacttgactggttatatcacagaaggtcaaatcattctttcaagagagttatacaaaaacggcatccagccgccgattgatgtcttgccttctctttctcggctgaaggacaagggaacaggtgaaggcaaaactcgtaaagatcatgcatcaacgatgaatcaactcttctctgcttatgcgcaagggaagcaagccaaagaactcgcagtcgttttaggggagtcagcactatctgatgtcgataaaatctatgccaagtttgcggaacgctttgagaatgaatacctggatcaaggttatcaaacaaatcggtccattgaagaaacgttggatcttgggtgggaactgttggcgatgctgccgaaagtagaattgaaacggatcagcgatgcgttactagaggcgtttttaccacaaggagaggatgcagatgagcagacaaaccgttaatccaactcgcatggaactaagccgcctcagcaaacagttgacgactgccaaaagaggtcataaactgttaaaagacaaacaagatgagttgatgcgtcagttcatcgaactgatcaaacaaaacaaccttttgcgtaaagaagtagaaacacaactacatcgtgccatgaaggcttttcgcctagccaatgccacgatcaatgaaaagtacattgaagaaatgttcatcttgccagcaacagaagtttctcttgatgtctcaaccaagaatatcatgagtgtggaagtgcctgtgatgcaattcgactatgatgatgtggtgatgcaggcaccgatcgagtatgggtttgtgaactcgaatgttcctttggatctggcaatgggacgtttcaccgatgtcttgcctaaactattgtctttgacagagatcgaaaagacctgtcaattgctggcggatgagatagaacgaacacgccgccgggtcaatgcgctagaatatttgacgataccagaattggaagagacgatctatgggatcaaaatgcgtcttgaggaaaatgaacgcgccaatgttactcggatgatcaaggtaaaaaataaaacaaagtgaatgccacgtcagtcgaaaatctgcttggcacaaaggtaggaaagaaagatgaaaaaaagaatgtccaaaaaaatcagtgcaccgcagctggttacactggtctttatgatgttgatcttgatgggaactgggttgcttatgttaccagttgtaacaaatgatgggcaaggtgtgcctttcttagatgcattgtttaccgcaacttccgcgatttgtgtgacaggactttcgactttttccatttctgaacagtataatatgggcggacaagcgattcttttgatcttgatcgaaattggggggatcggttttatgtcgatcccagttttcttttatatcttagcaaaaaaaagggtcaatttaagcactcggatgattctaagagaatccctcaatcttgaccgaatgtctggcgaatttcaattggcttggtacattatccgcatcgcatttttgattcaatttttagggatctgcctgttggctctgtcttttgtgccacgctttggttggcagcaaggcctatggtttagtatttttcacgccatttcttccttttgtaatgctggatttgatctttttgggaatagtctggtctcttttcagtcggatccttttgttttaggggtcattagtcttttgatcattgccggcggcttaggctttctggtctggtttgacttgttagctacttcaaaaagacgctcgttgcacagccgtattgccttgttggcaatgattgttttgctgattttagggacggttggtttttatgtgaccgaatatcactccagtatcgtatcaggcgattccattgttagtcgctttttccagttattttttcttgctgtgacccctcgaacggctggattttatagtatcgattatggccagatgagtcaggctgggttaatgttgacgatgattctcatgtatatcggcggtacttctggatcgactgccggagggctgaaaaccacgacggtctcagtgttgatcattaagattcgcagtttgttgaaagggcgcaaacgagctgaagtttttggcagaacgatcaaagaggcggctgtttcgcgggcgttcacgctctttttcttaacactgagtctttgctttattgccatctttttattatccatcacagaatcgatgccggggaattctcagtttggactggagtacattgcttttgaagttttttcggcttttggaacagttggattaacaatgggattgactccgtatctttctgtatttggtaaattattgatcatcttattgatgtttattggtcgtgtgggcatcatgacggttgctttttcattgatgacaaaagccaaccgccgagaagccggatacaaattcccggatgaaacggtcatgattggctaagatctgttattaaaagttgttttggatcaatggaaatcatccccgaaaaatattgccgacttttaggttagtttaaggtttctcgtctaagatcttcctaagaactaaatgagtcagttgcagcatttcgttagagctgctaggacaatccaaaggtgggaagaccatgagcttgtgggaattgtggtttgtaggaaaaacttttgtgaccgtgctgctagtcgtttttttactagaatggctgtacttgttacggaaactttcaagaaaatcgcagcagttgatctatttactgctgattttggttgaatggcacagcaacggctggatcgggctcctaacaagtttagtatgcggaacgtattttttcgggcattggaaagagcatgctgatacgactgcatcgattcaatcgacagtgtatggtgatgggcaagagggtactgaaaacttgatgcaaaaatactagcatggcttgggtcaatgggaactattgccgctgatatgcttcttcatagaaaagacactgctagttaaaaagaacctgtggtaaacgaaaagataacttttcgcagcacgggttctttttgataggattcagtgagtgatttacgccgttttgcttactacgtggaaatagccttctttgtcttgaatgatccagacattttgattgtcattcttgacgatgacgattccttgtacgacctcattggtgactgtgcgaaattcttctttattcatttcgatacctccaaggtagattccaattattttcagaagggggcagcacgacagtagagaaaaagccgtgctgcaaagcaaaaagaaaattaattggtagctatagtatacaggcaagatattgagttctagtcaatttcatgtaaataatcggttaaaggagaatcaatctgtcaaagaaaaacgcagtttcattttggtattgcctctttccaccatttctcctagtaattgagtggcatgtgataagtaaagctgggccatttcacggttggcttcttccaataactgatttgttaatgggattgtctgatcgatcttctgctgaatcgctagacaatttgccatgattgtttgttcaaaccgttctgctagatcgctgtatagatcatagtcttgatccccgatcagtgctaatgttttagtcaaccaatagctatttcccggatcgtaagtagtggtggtatcacaataacctttcggggtctcattcacattgctgtaaaaagggaccactccattgaaggtattgggaccaaaagctaaccagtgaacgcctgcaatttcatcaggtacgtgactgcgcacttggagaatatgcacttgctgattgcgattgagagcaatcgaacgaaagcgagttctctcactagccgttccattcccgtacggatcataaggggtattttgaaaatgactgctcaacgcccactttacatccatcacgctgattttctttttcggaagacagatgaaaggtagatcttggtcaagcggatccgacgcggtttcgctgaactgtttttggatataccaagctctagggttgttataacgagtatctttttctgttgcactgccgaaaatatgacgtaaattgattccttcaaagtctggatttaagtgattgctgacaatcatatcaggtaaatcgtcggaaaataaagtatcttgcgaatcaaaatcgaaggtagcgatattcattcgattcggggcgatcacataagcatcatcaggaattcggatcgctgcccaatgatgtccgccaatcgtttccatataccagatttcttctcgatcggcaaaagccaaaccattagactcataggtaccataagtttctagtaactcgcctaagcgtaagactccttctcgagcagaacggatatagggaagcacgatactgacaaaatctgcttctccaatgccttcttttaccaaaggatcgatagctaaaactttcgcattggtagtgatcgtttctgtggcggtcatggcgacattggcgctgttgattcctgaagcagcccagactccttgagattcatctgcctcaggcgtagaagtataccttaggggatctttcggtaaaggaatactgcacccgcttaaaacagcatggaacgtagcaggctgttgttcaggctggattacgacaaatttttgtggtagggacactgccccggcatcttcattgcgagcaatgagggtcgagccatcgagtgatgcgtttttgcctaccagcatggttgtacaagaagctgatttgcgtgtcattgacaaaactccgatcttcagattattttgttgataattgaacatagtatagcgagtaaaagacaaattgacaatcaactttcgactaaaaattagttcgctttctgtgtgacttttagtaaaataggaaagaaggagtgaagaaaatgaaacgaatcgttatttttagtttgctgtggctggcagggattgggttgagcggctgttctgaagctactacccagacaacaacgactggcagcaatcaagctacagctagctcggtggttaagcaacagacggctgagatctcatttgtgaacaagacagatgcgcagcctgaacaaataccagccaaaacggtgtcattcaaagaaggaacctctttaatggagataatgaaggaaaattttgatttagtggaagacaaaggcatgatcaccagtattgaaggattagcgcaagatgaagcggctggttattattggacctatacgatcaatgacgagatggtcaataccggcgcaaaagatacatctcttaccgaaaaggatcgagtcgtttttacctatgagaaattttaaaccgacaaaaatgtctttttccgtgcaagagattgcttatcttgctttgctagtagcagcatcagtggtggggcgtacattgtttcaaccactgccaaatgtacaaccaatgaccgctattttcttattggtggctctttatttaggctgtgtcagaggactgatcgtcgcattgttatcccttttgattacgaatttttacatggggatggggatttggacgattgctcaggcagtaagttatacagtcgtgatcctcatgatgagcggattaagacatgttcccatcgttaaacgttccttgatcttgcaagtgatttttagtattttagcagggttcctttatggatttgtggtctccttactcagcgtgtatctgctaggcttaccaagcttttggggctattatctgcaaggaataagttttgatacgctgcatgctgttggaaatggcttcttttatggactacttgcgccaatatttcgacgactttttcaccgttattatccagctaaaaagctcatccattagtgcaatctgctgattcagcgctttattgcattcattgctagtgtcattgatctgtctcaaagaatgatcaatgacactggtttttatatcgatatctggcaagatcctccttgtagatgctgctacaagcataattgtgttgttctcttacaaaatcgggtattcttaacctatactggaaagggagcggtttcaatgaagtggatcgtaaaaaaagaagatctagaagcatatcggacgagattcaatgggaaactggctggctatgctgaagaagctaaagtaatggcgattcctttgccaaagtattatatcgtaatcgttgatgaagaaaaaattagtttgattcaattggatttgaactttgaacaaaaagccatggaaaccgtgctgatccatgagatcaccacattgaaaattactggtgtcatgaacaaaaaagtgttgatccagacgccttctaaaactatcaaggttttgattaaaccgatggcgatcggaatcaaagaagagcagcaacagttgatcgatacgtttacccggatggcgagctgactacttattttagaggaaaaatcaaaaacggatcaaacgccaagctggcggattgatccgttcgtttattctggggttcccacaattttgatgtattcatcgatatttttgattttcatatgtttgatcactaactgttcacgtttgttccatttgccttcgacttctagctggtacttgttgagaggtaagcgtaaaacgtaactagaaaggtaacggtctttaataatacagttgatgattttatggtcttctaataattggattccagtcagcatcatcggagtttcttgaaaaacacgactgttgactaacaatcctacatgtgtttcattcattattcgatcctttctgagaaaaataaattctcgaatattcttcttttctatgttacccgatttatctaggaaaggcaattctggaaaaacacctagcaacgcaaatcacggaataaaacaactggtgaagaggaatcactacacgattgaatggcagaaagtttttacagaaaaaagacacagaaaaaaagatacagaaaaaaagacagaataaagagatctgaaacggcgagacaaaaggaatgaacacaaagaatgaataaataagaagcacacgaataaacaaggatttttgatggcgcttaaagagaaagcgtgtgaaaacatatcatttcttaacgtttaaaaaaggcaactttttgtttgaagtagcttagagaaagggagttaagcagaaatacgttcttctagaggaaatggcacctgtaaaagaacgaggactgcaagcttgaaaacaggcatttcagcagatttctgttaaaataataactataaaagaattggaggagacacatatgaaaaaatctggattcgtagtaggtttgattggcgcggcttttggtctggcagtttataataaaatgcagaagatgactgtcaacaaagattctgttaaaggcaaagcaaaagaagctgcgggaaatgtcgttggcaacgaaaaaatgcaagcagaaggaacattggatcaggttgtcggtgcttctaaagaagtactaatggacttgaaaaattctgtgtcctctgccattggggttggaactccagacaaggtggctggtaaagccaaagaggcagcaggcgatatcacggatgatccgacaaaaaaagcagaaggctttgttgatcaagcagcagggcattctaaagaaatcattgcagatcttaaagacaaatctgagtcaatggcacaagatgtcaaagataaattcgaccaaaaataggatgtagtgagagacaggcacagagggcctgtcttttttttgtggctttttttgcaaacaaaaacaatgatcctgtcacctgaagagcgacaagaacgaaggatcgttgtgcaatgatgggatcgctgacaaaagtagtaattgatgcttgacacatgaatgtacgttcatatataataaaaatgtagatatgaacatatattcatttgtaagcaaatgatgcactaactttgaaggaggcttttcttatgtctacccactcttgcaatcattcaacaccacacacccatgcagcagaggcaagccattcccatggcaacgccccgttacgtaattatttagtaggagttattctttttattgctgctttattggtaccgcaattggtcgttaaagatttattatacagtgccgctattcttttagcagggtatcatattatttgggaagggatcgaagacaccatcaaagatacccgcaaaagcagacactttaaaccgaatgttcatttattaatgacattggctgcctttggttcagtattgatcggcaacttcaatgaagctgccttgctgattctgatttttgccggggctcactttttggaagagtatgcagagggccaaagccgcaaagaaatcacgaacctcttgaagttgaatccgacagaagcccgtctggttaaggcagatggcagcattgagaaaattgcagcagagcaagtcaaaaaaggggataggctgcaagttttaccaggggaccaaatcgcaacagacggtaaaattctctcgggaatcagcagcatcaacgaagcctccatcaacggtgaaagtgttccccgtgaaaaaactgtaggggatgaagttttcggaagtacgatcaacggtaacggcacttttatgatggaagtgacaaaagacagcagtgagacagtttttgctaaaatactctctgttgtggaatcggcacaaaacaatcaatcaaaaacagaaacccgcatcaaaaaaatcgagccgctttatgtgacaacggtcttgattttggtacccttatttattttgacagcaccctttctttttggttgggattggtcaaccagtttttaccggggactagtgatgatgatctctgcttcgccctgtgcattagccgctagtgcagtacctgctagcttgtctgctatttcaaacttagcaaaacggggcatcttatttaaaggcagttcttatcttgcaaatatgggacaaacaaaagtagccgcctttgacaaaactggcacattaacgattggtcaaccacaagtgaccgatgttttctttgctgaagaaacaactgaagcgcaccgtcaagagtgggtatcgctgatcttggccatggaaaagcaagcaaatcacccattagcggctgccatcgtagagcattttgagaaacaagaaaaggcacaaccattagaactttccgttaacaaccaaattggttccggtctgacggctgtagttgagggaaaaacctatcgaattggcaagccagcggcgacgtttgcgcattcatcatttgctgagcaacgagaaaccctggaacaatcaggcaaaacggtggttgttttttcggtggatgatcagccagttggactgatcgcattgatggacttaccgaatcctcaatctaaagcggtcatagatgaactgcagcaatctggtattcgaacagtcatgatcacaggagacagtcaagcagctggacaagcgattggtgatcagcttggagtagatcaagttgctgcaaatgttctgccagaaaataaggctcagattatccagcagttgcaaaatgaatacggtcagacagtcatggttggagatggtatcaatgatgcgcctgcattggtacaggccgatatcggttttgctatgggggaaggatcggatgttgcaattgaagtgggggatgcggtgatcatgaaaaatgatctaacacgctttacctacgcactaaagaccgcaaaaaaactagatcggattatttggcaaaatatttttttctccatgtttattgtggcattattgatcgtattgaatttgctaggcaaaatgaatattgggttaggcgtctttgctcatgaaggcagtacattactcgtcttattcaacagcttgcgcatgcttgcaccaatgagtgagacagtcgcccatacatcaaaaaaataatcaaaaaacgcttatgctgatttaatggccatccagcataagcgttcgcttttttattaaacaatgtcattgattgtacgctgcagaagagcgaggaaattggtcgatttttgctaagcgctgatcgattcgtttgatgatgccttctgaaaactcgagattccggatagaagagcgagccgcaagcaataattgtttttcttgcatcaaatcttcttggattcgatagatattggctaagcgttccacatattcataatgggtgtagtccgtctggctgatcaaaaacttcaatagatctgctgcctgcatatacgcttcttgcgtataataagtgatcgcttcccggtataacttgatttcaaattcttcgattttttgggaatttgcttttaaatcccgccattcgttgattgaaatttttttttggatatttcccaaatcgtcatacaaaaaaatcacagggacgtcattgggatgttttgtttcttgtttgatttttttcatgtcgtacctcctgcgttttttgctccgtttttactgatcatttctcgttgatacagtctattgtaaaagcaaagcaacaaaaagtctacatgaagatgtcaaaagaattgttcttttagcgcattctcatcttaataactacgttttctttgaaaatgattgattaaatccgagatccccataaaaatcaagactccgccaaaaatttggaagaacaaaagccacgtttgaaacggattgaaaacaagaatgatacctgccacaatcacgaataaactgaaaagcaaaccagtgataaatggtaagccattgcgtttttgattaaagcttgccatcaaacgcgtacagccactgatcgtgatcatgattcccaaaaagaatggtacgatcgataatagtccctttgcaaaaacgagaatagctgcggcggcaatcaaaagcaggatccccgttgtcatctgcatattcacatagccggtttgccgtttttctttgtaactggaatagaggttgatcaccccaaggcaggcaacatatccggcaactaaatagacaatcgtattaaagacactgcgaggagcaatcaaaataatcaatccagcaatcaaaaataaaatcgctcgtaataaatcgtatcgttggattttctcgaaaaaagtattcataagttcagttcctccttttttttactattgtagcggatttctttcaaaatagaaaatagaaacgcgttgtaggataattctgcttttgaagcagcaaattatttggtaagatagatgaaacaacaaagaatggagaaaactatgagtgtattaacgcttttaatgtgtctgttcacggtcgtcttgtatttgtttctcgctgtcgtccgcaaagacattcaaattgttgcagccagccgtaaaggcggaaaagcagcaattgctttcttttcattggtggtcattatagcaatgttttttatggaagaaacctttgagaaccgcttgcgaggggtcgtatctggattgcttttcttaagttttgtttttgatagcagagggttagctgaagatcgattcattattcatccactaaatattcgcgggatcttgtatcaggaagtggatcgggtggtactgtatcaggagagcaaggaccaatggatcaaaatgaatttctttcgaagagggatgcgaggaccactgttgaaattcgagcgtccaatggaagaattggtcctgtttttgacggagcatctaaatgaaggaacaccgatcgatattctagttgatcaagagccaaaaggtcattgaatttctttaagcgatcatataaattgagagaatcaattggccgggcccctttgactgcaaaagcaaagagacccggtcaattttttaatttaagggactatccagttgatttttttggcaaaattcgagtacgccgaatacaggaagcaagctaggtttctgaccgaacgttttgctattttttgtttaagaagaacagggtcttacccttaaataaagggaatatggtagaattgagtatcaactttattgttttaattgaataggtttacatacaaaggaggacgatgctgttggtacaaataaaagaggtcctcaaaaccgttttgttcgttgctctgtttgggctgttactgttttcgttgcgacaatacgtcttcactcctgtgatcgttaaaggagattctatggatccaacattgcatgatggggagcgtgtgatcgctatgaaaaacacccagatcagccggtttgatatcatcacatttgaagcccctgatgaggtgggaaaaaactacattaagcgtgtgatcggattacctggtgatgtggtggaataccgtgaagacactttattcatcaatggggcagcatatgaagagccttatctttctgcttttcgttcaaaattaaccgatggttatccactgacttctgactttacgatggctgatttcggtgttgaacaaattccagaaggaaaattgttggtgttaggggacaatcgccgaatctctaaagacagccggaccattggtttgattgatcagtcagccgtattaggagatgtcaaatttattttttggccccttaaagatttcggaagcattccgaatcaacactctgagtaagcggaagtccgactcgctcagagcttttttttaaaagaaaatttgttatactatttgttatgaagacaatggaagaaaaattgtcaacggatcaatagagagcatcaaaactgttatttttcatgagcaggtttggtagatgcaggagttgatctttacttacgatagaaacgacgataaaagtaaaggagtcttcgtatgagtttacgatttatactaggcgatggacgctgcgatcacgaacaagcgattttggacgcagctaacgcttggctggaaaagccacaaacagaagtcttttttcttgtccctaactacaataagtttgaacgagaaagagagattctgcaggcgctaaaacaaggcactggagattttgcctcgattcgagctcaagtctatagttttcaccgtctggcctggttctatcttcaacaaactggctggttgtcaaaaacggccattacagataccggtgcaaccatgatccttcgcaaaatacttctcgatttggaagaggagttgattctttttcgaggagaaatcaataaacctgggtttattcaacaactgttgtctctttatcaagaaatgcagacaagtaatatcgcaaccgaagatctgcatctcggtggaacgatgaataggagcaacggagaggatgcgttaaagttttccgaactcgcattgatctttcagcgtttcgaattagaaatggtgacccgggaactgcaagtggaacaaccgctggcactactaacacgttttctgcagcaagggtctaaacccaatgaattaatgaacgatcggcctgatctttcggaatcattatttatcatcagtggtttttcagcattttcaactcaagaacagagtgtattaaaagaattgatgaaacatgggcacgtcgttgtcgatttgcttttagatcatggatatccccaagaattaccttcaccattagatttgttctatgaatcgggccgcagttaccatcaattatttcttgatgctagaacggaaaatgtcgccatttatttggatcaaaagctttcaccttctgaagcacagcaagtgacactagagaaagctgccgcatacaatgaagtggaatccttttggcgtaaaacccagaatcagctccattatcagcagcagcaatcagtttcaccgtatctagaaatgtggaaagttggcaatcctgaagaagaagtccggcagatagctgcgaaaatccgcgcattgatcagcgagcaaaaaggagcaaaactgcgttatctagacattcaagtcttgacactgcaaccagagatctaccatcaatatattccaacgatttttaaagaatatgaaattccgttttatattgacgaagagcaactcatggctcagcatccgctcgttgaattcttgaatgccttctttgcttgtgcagattatggctttcgtttaaatgacatttttcgactgttgcgtacggaactttatttgccaccagcattccaacaacaagaagactggctggctgcccgggatgcatttcgacaattagtagacattacagaaaaccaagcactggctcataacttccaaggaaaagattggacccgtgagagagactggctcttagtggactatacattgacaggagaaaacgcatctggcatcgctgaattgacagattatacgaatcaattgcgccgctatttccgtcaagatatttttggctccttaaaaaacattcaagagacaaagacgaaccgggaagctgcaggtgctttataccaatttttactttcagcaggtgttgaacagcaattgattcattggcgagatcaagcaatctcacaagggaaactagagcaagctcgcaaccatgaacaaacatggcaagctttgatcgatcttttagatgaatttgtggctatttatggcgatgatcctttcgaacagtcactctttgaagaagtattgatgacgggtttggagaatctgactttcgggaaaattccgacagcaatcgatcaagtcaatattaatcgttttgatctagtacgacctcggcaagcaaaaatcactttcgtaccaggattgaatgagacggtgttgccaagaaggatcgaaaataaaacattgttgactaacgaagaaagacaacatctcaatcaattgtttgcgggagaaaaatatctacgcgatacgattatcgaaagtagcgccaaagagccgtttcttttttatgcgatcttattgtcttccacggataaactctatttgtcttatgcatgcaattttgatacccagcaaaatatcaaattgtccccatatctggctcgtctgcttgaatggttagatgtttctttacaagaccggggcatcttatctttaaccagtgatccagaagcctacgtcggcacgtatcggggattaatctatcagttgaataatctaagtcagcaggcaagaaaagaacgacagaatttgccggcaaagtggcaacggttcaaacaggctttattgcattcgcctgaaaaacaattagcccttagagtatttgaaagccagacccatcaaaacattccagtcccgttgtctcaagataaagccgttgctttatatgggccatccatctacagttcgatctcgcaactggagacattctaccagtgtgaatacaaatattttgtcagttatggactacgcttgaaagagcgggaaatctatggacttaactcagcgatgactggtgaatttttccatgatgcactcgatcgctttgtcaaagtattgatcagtgagaacatctcattgacgcagttgaccatggatcaacggctccaatttgttgaaaaagtgttgcaagagatttttggagaagtccgctatacattattgtccagttcggccagaatgaattttattcgttatcaactaggtaagacgattcagcgagtagcttgggcattaacgaagcaaggacaaaaaatgcacttctcaccgcaaaaaaccgaagtactgtttggacagatcgctggcgctcaagggatcaatggcatcgagctgcctttaagcagtgggggcaaactgcatgtgcgaggaaaaatcgatcgggtagatgcagcaaaaaccgaagaagagcagtggctttcagtcgtagattacaaatcaagcagtcgtgaatttgatttgacagaagcttactatggcttagcaatgcagttgatcacttatttagacgttgcgctgaatgatgctgtgcagctagttggtacagaaaatgtgcgcccggctggggcttattatttacatgtccatgatccagtcttagatggtcaaaaatcctctgaagaggaacggttgaagcaattcaaatatgatgggttgtttctggatgaaccctcattgtttccacttttggatcatgaattgtcagacagcagcaattcggcagtttttccgattcgcaaagacaaaagcgggacgtaccaaaagacaccacaagccaaaaacaagttttacactgaagaagagattcgcttgttgaggcagcacaaccgcaaaaatatgcagcaaggtgcggagaaacttctcagtggcgaaattgccttgaatccgtcttataagctgaaagacaaaaagcgcgcctgtgagttttgcccatttcgcagtatttgcgatttcgatgtgatgctgcaagaaaataattatcatcgtctagagaatttatcgaaagaagaggttttacagcgattaaaggaggaggagaatgactaagatccctctaaaaccacaaaatgaaacatttactgatactcagtggcaagcgatctttgataaaggagacaatctccttgtttctgcctcagctggatcaggaaagaccaccgtccttgtgcgacgtgtgatcgagaaattaaaagcaggaattcagatcgacgaattgctgatcgtgacctttaccgaagcagcagcaagagaaatgaaagaacggatccaagtagctctgcaaacggccattaatcaagaaagccaagagcaaaaaagacaacatttcgttcggcagttgcaattattacctaccgcaaatatctcaacactacatgccttttgtttaacggtcattcggcgtttttattatctgatcgatttggatcctggatttcggatgctgacagatgaaacggagattttgctgctgaaagaggaaatctggacacaattacgagatgcacactacgaagcaaatgatgaagccttctttcgattaaccgaaaacttcgccagtgatcgttccgatgagacggttggtgatttgattttgtcactctatgattttgcccgcgccaaccctgatccagaaaagtggctggacggtttagcggtaaattatgaagccgcggacaatttaggggagaatcacctctatcaggctcaaatcaaaccgacgttggtagaaattgccgcaacggcagagcatttgctggcagcggccaaacaatttgcagatcagtcaccattaatggaaaaagcagcagcactcgttcaagcagagatttctcaagtccaagaaattcaacgagttctggcaacagacgatctatccgtcttatatgatcgcttgactcatttgacctttgatcgctacccaagctatcggaaagaagaacaaaaagaactttcacaggaaatcaaaccgttgcgggatgatgccaaaaaactattagaacaactcaagggatattttccttatccaccagcagacatgctgcaaatgctgcaactatctgaaccgatcgttgcgactatggcagagatgaccaaagagtttttgactgcttttcaagcccgcaagctagcaaaagggttgttggatttcaatgatttggaacatttcacgttgaaaatcttattgggtgatggcacaggcagcgatgcttctgtttattaccgcgataaatttgaagaagtgctcgtggatgagtatcaggatatcaatcgactgcaagaagcgattctgtattgggttcggcaagtttcaggagaccatggaaacatgttcatggtaggggatgtcaaacaatcgatctattcatttcgcttagcagaccccactttgtttatagaaaaatatttggcatttgaacatcaaaacgggggacgaagaatcgttttagcagaaaatttccgttcgcgccgcgaagtgcttgattttacgaacttggtttttcaacaattgatggacgaacaagttggacagatcccttatgatgacgcagcggctttagttccgggatttccgagttttcctgaaagcgacgcattcattccggaacttttgctctatgaaaaagaagctgaaagtactacgaatttgattgaagacaaaacggaaggagaacttcacgtcaccgcaatcaaaattcaagaactgatccaatcccaatttatgatctatgataaaaaaagacgggcagaacgtccagtcacttatcaggatatcgttttactgactcctacccgcaaaaataatttggtcatcttagatgttttcaaaaaattcgggattcctctggaagtcaatgatgcccagaactattttcaagcaacagagatccaaacaatgatcgcattgttgcaaatcattgataatccttatcaggacattccattagtggctgttctccgttcacctatggtagggctaacggaagacgaactagcagagattcggctagcggatcgtaccagtgagttttacaaagcggtcttgacttatcaagacaaccaaaaggggactgtttccgctttaagcaaacgagtggatgattttttaagcgaattgaatcgttggcgggaagcagctcgcagactgccgatccctgatttattatgggatatttatgatacaacggcttacttggattacgtggttggcttgccagcagggcaacagcgctatgccaatttgattgcattgatccaccgagcagagaaatatgagaaaagcagtttccgaggattgtatcaattcattcggtttattgaaaaaatgcaagaaaaagataaagatttggcagaaccgttggcgacgccagctgaaaatgctgtgcgggtcatgactgtccatgctagtaaagggttggagtttcccgttgttttcttattggatacaacgaaatttttcaattaccaagactttcaaaagcgttatatttttgaagaacaacttggcgcaggtatccaatatatcgatgcttcggaaaatatcaaatatgaaacgattccttttcaagccatcaaacaagttcgtttgaaaaaagccctctctgaagaaatgcgtaaactatacgtagcattgacacgggccgagcagaaactgtatttagttggttcttataaggatcggcaggcagcctttaaagcttggcaagcggggttgacacaaagtcagacagtccttgacccggctttacgtttagttgcaagaggcagtctaatggattgggtcggtttgacattgattcgtcatccagagatggagcagttttttactgatgccagtgaacgaaaaatgacgatccatcatcctgcaagattccagatccattggtggaatcaggatcagattgatcagcaattgcaggtgcagccgccaacagaggcagttgtggctccgacaccaagtactacagccccagaaagattgctgaaccgtttagactatcagtatccttacagcaaagcgactcaaaccaccagctatcagtcggtctcagagttaaaacgtctatataatgatccggacgatcaagatattactttactggaatggcattccgcggatcaaaaattggcacctcagcgctttcgttatgttgagactgaattagctaaaccgcgttttttacaagaacaaaaaccgcaagctgcttcgatcgggagtgctacgcatctagttatgcaaatgctgccgctgactgaagtaccgacggaagcatccttagcagcttttatcgatgaattggttgaacgtcagctctttacgaaagatgttgccgacaaaattgatcaagcgagcatcgtgtggttctatcaaacagccgtggggcaaactttgatcaagtatgcaacacaggtaaaacgggagcagccattttcaatgctaaaagaagctgccactatttttgaaggatttgatgaaccagatgccgaattattgatccacgggattattgatggctatgtggagttgccagatcgaatcattttgtatgattttaagacggatgctgtatttggcagtgaagcacagattgaaaagcgcatgcgggatcggtattttggacagctaaaactgtattgccaagcgttagaacaagctttgcagaaacctgtgactgagacatatctggttttactagccgctaagaaaataatcgaatggtaggccctcgaacgggattccttacaattcgtaagcgatgtgctataatgatgcaaagaggtgatagaaaatgataaaagtggaaacagattacgccctttgtcctaaatttgaaaaagctttttcgattctagggaaaaagtggaatggcttgatcattgatgtgcttcttgaagatggcaaacaacggtttgtggatcttgccaaaaaaatcccccaagtgagcgatcgggtattggtggagcgcttgaaagaattagaacgtgaagaaatcgtctgcaaagaagacaatctttactgtttaacaccaaaaggggtcgcacttgaaaaaagtatgatgagtgtgaagcgctgggcagaaacttgggtcagagaagaagaatgcagttgatttctggcaaataattaggtacactaaggtcaatcgaatagttaaaaagcgttgatggaaactagtagtttggctgaaacaggaaagggagacttgtcatagactgaaagcaagttctgtattcgaaaaatgaatttcatttctggagcttactgaacaagaatcagtcggcagtcctgctgtcgttagtagaagtgagtgcgtggactttgtccacgaatgaggatggtaacacgagacgtcgttccttttttaggaacggggtctttttttcgtcttgacttatcagctattcacaaagaataaggaggaaaaacatgtctttacaagagaaactagagtcattgaaagaagtaacgctttcaaagatcaaagaaagccgttcaatcaatgaattgaatcaagttcgtgtggatgtccttggtaaaaagggacccatcacggaagttttgcggggaatgaaagagttgtcagcagaagagcgtccaaaagtcggcagctatgccaatgagatccgggatgcgattacacaagcgattgaggaagcaaaaacttcattagaagcagccgcactagaaaaggcattggctgaagaatcgattgatgtgacattgcctggcaagcggatgccacaagggacccgtcatgtcttgacgcaaatcatggaagaaatcgaagatatttttgtggggatgggctatcaagtggttgaaggattcgaagtcgaaaaagatcactacaattttgaacgaatgaacttgccaaaagatcatccagcaagagacatgcaagatactttttatatttcagatgaagtcttgattcggacacacacttcaccggtgcaagctcgtaccatggaaaaacatgatttcagcaaagggccattgcgaatgatttcaccaggaaaagtattccggagagacaccgacgacgcgactcacagtcatcagttccatcagattgaaggactcgtaatcgataagaatgtgacgatgggtgatcttaaagggacactagaagtcatgatgcaaaaaatgttcggggctgatcgcagcattcgtttgcgtccaagctacttcccatttacagagccttcagtagaagtagatgtcagctgtttcaaatgtgggggagccggctgtaatgtctgcaaacacaccggttggatcgagattttaggcgctggaatggtacatccgaatgtattggaaatgtccgggatcgattccaaagaatactcaggttttgcatttggtttaggacctgaccgggttgcgatgttgcgctatggcgtcaacgacattcggaatttctatcaaaatgatgtacgtttcatcagtcagttcaagggggaataaatatgttagtatcttacaaatggttaaatgactatcttgacctttctgagatctcaccaaacgagctggcagataaaatgtcagtcacagggatcgaagtcgaaggaatcgaaatgccagcagcgggattgaagaaaatcgttgttggggaagtcaaagaatgtgtgccacatccagattcagatcacttatcgatctgccaagtagatatcggtgaatctgaattatcacaaatcgtttgcggtgcgccgaatatcaaaagcggcatcaaagtgattgtggcactcccaggttcacggatcgcgggcaatgtcaaaatcaagaaagggaagatgcgcggacaacaatccaatgggatgatctgttcgctgcaggaattaggctattctgatagtgtgatccctaaagaatatgcggagggtatttattacttgcctaccgatgccgaagtggggaaggaagtctttccctatctcgatatggatgatgccatcatcgagttgtcgatcactccaaaccgggccgatgccttaagtatgcggggggtcgcttacgaggtaggagccatttatcgacaaacaccaaaatttgagaccattcaactgaatgaaagtgctgtgaaagccgcagacaagatcaaaatcagcgtagaaaatcaaaaggatgcgccagcctatcaaattcggatcattgaaaacgtaacgattgcaccaagtccgcaatggttgcaaaaccgtttgatgaatgaaggcattcgaccaatcaacaatgtcgttgatattaccaactatattttgctgctgtttggacaaccccttcatgcattcgattatcaaaaattgggcagccaagaaatcgtcgttcgccgtggcaaaccgcaagaaacgttggtcactttggacggagagacacgaacgctagatgataagaacattgtgatcactaatggaaaagaaccagtcgctttagctggtgtcatgggtgggttagattcagaaatcacacaagataccacaactgttgctttagaagccgccttgtttgacccactagcgattcgtttgacgtctaaaaaattcaatttgcgcagtgagtcatcttcccgtttcgaaaaaggcatcaatcaggctgcgatcgcggaggcttgtgatgcagccgctgctatgattgcggagctagctggcggtacagttctacaaggtgctgtcaaaggcgctgaagtgacccctaaggatgttcaagtcacgatcacattagatcggatcaatcgctacttaggaacacaaatcacgattaccgaagccaatgagatttttgacgccttaggttttggctaccaagaaaatgaaggtacctatcaagttgtggtcccacctagacgttgggatattcagatcgaagctgacatcattgaagaagtcgcccgtatctatggctatgaccgtctaccatcgacacttccaagtggtgagacagttgcggggagcttaaccaaagaacaacgcttgactcgcaaagtacgaacactcttagaaggaaatggtttgagtgaagctatcagctatgcattgacaaccgaagaaaaagcccgtcaattttgttggttagagagtcaggttacccgtctggattggccaatgacagaagagcgtggtgtcttaagaatgaatctactttcaggactgctggacgacattgcctataacttggcccgcaaaaatgccaatgttgcgttgtacgaagtggggcgcgttttttacaaaacaagtgatgaccctcgggagctaccaacagaaaacaatcatctaggactagccatcactggcgccatcaccgaaaaagattggcaagaagctgaacaaaaagtcgatttctatcatattaaagggatcttggaaaacttgtttgcaggtctttctcttacggatcagattacttatgaaaagacaacagcaatcaaagaacttcatccaggcagagccgctgctatcctcttacaggatgaagtgatcggttacctagggcaagtccatccaagtacagcaaaagcttatgatctgactgagacatatgttgctgaattggacttggatcgtttgttagcaactgataatgcagcgctcatttatcaagcagtttcgaaattcccatcagttaaccgggatattgcactgttggtggatgagaagacgtcgaaccaaacaatcctgcaaaccattgaacaagcagcaggccgtttcttgacggacattcatctatttgatgtgtaccaaggaaagaacatcgatagcaataaaaaatcaatggcctatcgattgacttttgctaatcctgaagcgacattgacagatgaagaaatcaatcaagcaatgtcgaagatcacacgtgtgctagaagaatcactacaagtagaaattcgttagtcccattgctgtgataggaaacagtgacataaaaaaagagtgatcttgaggaatcagcaagattgtagcatttgcaggggaaggtgttctcccttgctatgctacaattttttttataatggatagagtaaatattctcatggataaccacagctcgaagagttgcttttccagttttattttatggaagaaaggatcgattgatggaacaactgacggtttacgatgcacaaaagcagccaacagctgcgacgatgttgcgggatacgccagtccctaatgacggctaccgagttgtggtgtctgttttattgtttaatgaagccggagaattactgattcaaaaacgacaatccacaaaaaaaggctggcctagttattgggattatcctgctggcgggaccgtcaaagctggtgaaagctgttatcaagcggcagaaagggaactattagaagagttagggatgacactttctttagagaaaatccctagtcgtttaacagtgaaatttgaagaaggctggaatgaactctattttgttcaatggaccggcgctaaccctgaactttgtttgcagtaagaagaagttgctgcagcaaagtgggtcaatgaaaaagagtatcgcgcattgatcaatgggtataaatttattccttacttatatgcaccgatcgttttctcgcttcaaagtcatcctggggaatattttccggtctaagttcttactcgtgatggtagcttctttttgatagaaagcgattctgtcgtgattgagaaaaatgttctcgaatggtgtttgctcacatgtcaatggtagttgagcagttcgcttttttatttagggatctttaaataaaagatagtaattaaaaacaaacccaccaagcatactggtgggtttgttggttgttcatatttatgcaaagtagttgatccccattgcttctttcacttctgccaaggtttgtgctgcgacttgttctgctttttcgctgcctttttttaagaggttcatgacttcagccgggtccttagcaaattcttctcgtcgctgacggatcggagcaaattcttcttctaagacatcgatcagatagcgtttgatttttacatcgcctagaccgccttgacgatagtgctctttcaatgcagcaattttttctaaatctttgccgaagacatctaaataagtaaagaccatattgccttcgacttggccaggatctgctacatggatatgatttggatcagtgtacatgctcatgactttcttttgaacgatatccgcattgtctgccaaatagattccgttgttcaatgatttgctcattttaccatttccatcgataccaggtaaacgtcccattcctttaggcggaagaactgctttaggttccaccaatacgtcactatagatggaattaaagctatgaacgatttcttgtgtttgttctagcattggtttttgatcttcaccgacaggaactaagttggctttgaaagcagtgatatctgctgcttgtgagacagggtagatgaagaatccagttgggacaccttccccaaatttcttttgttcgatctcggctttgacggtcggattgcggcgaacccgtgccacactgactaaattcaagtaatacatggttagttccgacaactgagggatttgtgattgaataaataaagtcgagcgggtcggatcgagaccaatcgctaaatagtcaagtgccacttgcaagatattttctgacactttctgtggatttttggcattgtctgtcaatgcttgcatatcagcgatcatgatataaagttgattgttagggtcgtcttgcatctcaactcgtttttttaatgagccgacataatgccctaaatgaagttgccctgtaggccggtctccggttaatattgtgttcacgtttcatccacctctaaattcaatatatagttcatcttaccttgtttttccaaaagaaacaacttgttctactaagggtcgaaaaaaaacgatggacaaaaacctaacatgaggttaaaataatgaaggtttttctttggggatgatgtggaaattaaaactacctttacaaatagaaaaattttgagctataatatgaatcaaatcttttcaattactcatttatttttaaatatagacttggagtgtgaatgaatggcaatgatagaatttaaagacgtggaaaagtactacggcaaattccatgcattaaaaaacataaatattgaatttgaaaaaggtgaagtcgttgttgtgattggtccttcaggatccggaaaaagcacgatgcttcgcacaatcaatggattagaaacgatttcttctggtcacttactgatcaatggcaaagatcttttcagtaaagatgtcaaattgacagagattagaaaaaacatcggaatggtcttccagcatttcaatctttaccccaataaaaccgtgttagaaaacatcactttggctcccattaaagtattaaaacaaaatgaacaagaagcgattgccttagccgaaaaactgttgaaccgtgtaggcatgctggacaaaaaagattcttatccatccatgttgtctggcggacaacaacagcgggtggctattgcccgaggattagccatgacaccagaaatgttgcttttcgatgagccaacttctgcactggatccagaaatgatcggtgatgttttagacgtgatgaaaaaaatcgccagtgaaggcatgtccatgatcgtggtgactcatgagatgagttttgcccgtgaagtagccgaccggatcgttttcatggcagaaggccaagtattagaagatcgtcgcgacgtcgatggcttctttgaaaacccaagagacgaacgggccaaacaattcttaagcaaggtaaccaatcattaggaggaaagtagctatgagcaaaaaaatcagtacagtgctgctccttgtattcgcgctcatgaccttttctgcttgtaaaggccaaagtgctgcagaacgtgatgtgttagcgagcagcaaagaaagcaaccaaatcatctggggagtcaagaatgatacccgattatttggattgatggatattgcgacagctgaagtccgcggatttgatatcgatatcgctaaagcaatcactgagcatattttaggacgtgacggaagtgctatttttgtcgaagtcacatcaaaaactcgaattccgctattaaaaaatggcaatatcgatgcaatcatcgctacgatgaccatcacggatgaacggaagaaacaagtagatttttctgatgtttatttcgatgctggacaatctttattagtagccaaagatagcccgattcagggaatcgaagatttaaatgccaatacgacggttttagtcgtcaagggatcgacatcagcgatcaatatccgcaaggcagcgccggaagcaaaaatcttggagttagaaaattatgccgaagcctttactgcattacagtcaggacaaggcgatgcgatgacgacagataatgcgatcttattggggatggccagtgaaaatcccaactatcatttagttggcggtacatttacaaatgaaccttacggaatagctatcgataaaggacaagagcctttcttgaaagccgtcaaccaggcattgaaagaaatgcatgaagacggtacgtatgatgaaatttatcagaaatggttccctgatgatgcatctgggaaagttgattaaaggaggaaatttgcatgcttgaattgtttcaaacttacggcgaccagtttttttctggtttcaaatatacgattttctccagtttactggctttattctttagtttagtgattggtacattgatggcgatatttcagctgtctaccaatcgatgggtcaaagggatcgctaaagcgtatgtcgagtttttccgaaatattcctttgttgatcatcgtgatgttcttttatgtcgtggtgccgatgtattgggtgacttttgatggatttcaagcgggaacgatcggcttgaccatctatacgtctgcgtttattgcagaaacgattcgttctggaatccagacagttcctaaagggcagatggaggcttctttgtcctctggattcacttacagccaggccatgcgctacattattttaccgcaggcttttaaaatcgttgttccgccactaggaaatcagtttatcaacttggtcaaaaattcatcgattttagcaatggtagctggtcttgacattatgtatcaaggtgacttgattgccagtgaaacctttaatactttcgacacctatattattgtcggaatcttttatttgattatcacattaccattatcctatttaatggtttatcttgaaggacgttgggctgtacgctcatagaaaggagacactaaatggaatttttcgaagctttttctgccatcaatcttcggtttttgatcgacggtctccgagtaacgatcgaagtctccgtcttatcgatcatctttagttttctgattggcggccttgcaggagtcttgcgtttcactaacattccgttcttttcaaagattttaggtgtagtgatcgatgtgattcgaaacctgccgttgctgctgattattttcttcacgtactttgcattgccgcagatcggtattcgtttcaatattttctggtctgcagttgtggcattgacgatttttgaatctgccatgctctcagagatttttcgagcggggcttaatgccgtaccgaaagggcaaatggaggctggtttgtctaccggtttgagttatgtccaagtgttgcgaagtattgtgatgccgcaagcttttaaagccatgctgcctgcgatcgttagtcaattgatctcattgatcaaagatacgtcattggcagtgattatttcacttccagaactgactcaccatgctcgaattatttatggacaaaataccaattatgtattgccaatgtttcttgcgatgactgtgctgtacttcatcgtctgctatgccttatcgctgctttctcgcttcttggaagcacgtcagtataattactgatttcttgaggctgcatagaaacagtgattactagatccgaatgacctttgatgtcatgcagttgctttccttggacgagagtagccagagcatcggaggttttcggatctttttttgaccgcaataggttcattgttttcttggataaagcaatacttgaaaaatcagtaaaaaaagtccaaaatggaacttagacaaatttctttctttcattaaaaaggatggacaactatgacaaataaacaacccattggctttatcgattctggtgttggcggattgaccgttgttaaagaagcgattaagcaattgcccaatgaacatattatttatcttggtgatactgcacgctgtccctatgggccgcgtccggcagaacaagtcatcgagtatacatggcagatgaccgaatttttattgcagcaaaacatcaaaatgttggtgattgcttgtaatacggctacggctgtcgcattagaagaaatcaaagaaaaattatcgattccggtaatcggagtcatactgcctggctctcgagctgctgtcaaagcaacaaaaaaccaacagatcggtgtcattggaactgcgggtactattaaaagcaatgcgtatgaagaagcaatcaagcttaaatcacctcgttctatggtagttagcttggcttgtcccaaattcgcgcctatcgttgaaagcaatcaagcgcaatcatcggttgccaaaaaaatcgttgccgaaacactgcgccccctcaaaaataagaaattagatacgttgattttgggttgtactcattatcctttgttgcggtctttaatccagaacgagatggggagccagatccagctgattgattccggtgcagaaacagtgggtgaagtcagcatgctgttggactactttgctattgccaatacaagccaaatgacccaagaaccggaatattttttttatacgacaggttcaacaaaattatttgatgaaattgcgaacgaatggttgaatgtaccggtccattcgcaacatatcacattaggaggaaattaaatgcgccatgatggcagaaaagcgggaagtatccgtccagtagaaatcaaaacaaatgtattcaaacatccagaaggatccgtcgtgatctcatttggtgataccacagttatttgttccgcaacgatcgaagaccgagtgccgccttttttacgggactcagggaaaggctgggtgacggcagaatacagcatgctgccgcgagcaacgaatacccgtaatcgtcgagaaagtgcaaaaggaaagctgtctggtcggacaatggagatccagcgactaatcgctcgttcgttacgggcagtggtagacttggaaaagttaggtgaacgtagcattgtagtcgattgtgatgtcatccaagcggatgggggcactcgaacagctagtatcaccggtgcttttgtggctttgcgattggcgatcgatcaattattgaccaaccatgagctaacggaagatcctattaaagaacatcttgctgccatcagcgtaggaattttacctgataacacttgtgtcactgatttagactacgaagaagattctgcggctgctgtagatatgaatctcgtaatgacagagtcaggccgtttcattgagattcaaggaactggggaagaagcgacatttgatggtcagcaattgaacgaaatgctgatttatggcaagacagccattgaagagctgattgcctatcaaaaagaagcattgctgattcaagaacagccccaatacgttattcctgagaagacgatcgtgattgccactggtaatcctggcaaagcacgagaattcaccgcagtttttggtgctgctggctatgacgttcggacattgaaagattatcccgcattacctgatgttgaggaaacaggaacgactttcgaagaaaatgctcggctgaaggcagaaacgattgcaaaaattcttgggcgacctgttctagcggacgattcgggcttaaaagtggatgcattaggtggtagacccggtgtttactcggcacgttttgcgggtgaacaaaaaagcgatgctgcaaataatgccaaattgttgtacgaattaactgatatcccagatgaacaacgaacagcacaattccattgtacattggtctttgcagctcctgacaaagaaagtctcgtagtcgctgccgattggccaggcagaattggccgcattcctcggggagagaacggttttggctacgatccattgtttatccctgttggttcagataaaacggctgctgaaatgagtggagaagaaaagaatcaagtgagtcatcgtggtcaagccatcgcgaaactacgcaatgtatggcaagagtggttggaaggagaacaagcatgaaatatttaatcgttagcgataaccatggcgatcgtcaaattctcgttgatttgctagcagaattttctgggaaagtggatacctttatccattgtggagattcggaactgcaaccaagcgatcccctttggcaaacctatcaagtggttggcggaaattgtgattacagtccggaatacgaggatgcaaagattatcaaaacgcctctcgacacgatttatgtgacccatggtcatttggcagatgttcgttttggcgtgacaacactcggacttcaatcacaacaagctgatgcgtcaattgctgtatttggtcacacccaccagattgcctgtgagaaggtggggcatcgactattcttgaatccgggcagtatttctctaccgcggggacctattcaaatcaaaagttttgccatcatagaaagtactgaaaagcagtggatcgttcaatattatgatcgtacgtttaatgaaatcgctgatttgcattttatttttgagcgctaagaaagcgaaatcaaaagtaaaaaattcattataaataagcagttttacgatatctttttgatttttctagtaaaatagaaaagtagctgtgaaatggaggcattcagattgattggtcaaacagtagaaaaaatattattagaaaatcaagaaagttttttagtacctgcagaaaacgttgcaacggttctttacaatcatccattaaaccatgcgttactcgttttatcgaaagtcggctattccaagattccggtcctagatagtgaggatcatcttgttggattgatcagtttatcgaacgtggtcgaaagaatgatggacctgactgggtttagtatggacaacttagaaggcttgacggccgcagacgtgatggaagtcaatgtggcttgtatcaaagaagatggcgaattagaagacatgcttcatctcttagtggatcaggcatttttgcccatcgtcaatgaggaaaatgtctttgtaggaatcattacccgaaaagaaatcttaaaatctgtcaatcacctagcacatgaattagagaaacggtatatgctgatctcaaaagaggccagtcctacagacgaattacaagtcatctaataatggataaaaaagcaccccgaaaaaatcaggctctttgtcaataaggactgatgggttgtacaaaatcaaatctgggtcagaatgaacctcattctggctcagattttttgttatcttactttgattaattgattgatcaaaaagattctaattctcatgttctcaaatgatttaaatccgtaggatactcgtttcattgtctttatatgggtattcttcgcttctatttttccattggtgtaaggatagatcatcgcgttggtgatgccttcttcataggtcaaaaggttttggagcttttcccgaaagccgtcatctaacgtttcgggaagttctgccaataaggagaaaaataagtcagggtctttgtctcgaaaggcttcaactaattcatgaaaatagggatacgcctccttcagggacgtagaaaagccaagcaatcgatcaatcatcatcgcttccgtaagaaatgggtattttggtgctcgaaaacttttccatgttttgtattcataatggttgatgtttgcacgattttttagcaaaaagcgccagttctttttcagtttttctgcctgacttttctgtcctactttacgaagttcattcatttcacggatacgcaactcattaaaggcttgattcatgtgtttgataatatgaaaccgatcaatcactactttcgcatttggcagaatacgtttggtaagctggaagtaggcggcgttcatgtctgtgactaaaaattttacttcttcaggattagtgcagcctaagaaatagcttgttaatcgaggcaatttacgcgtaggcaagacatcaattaattgtcctgtttcgccatctgcgcaaataaagctcattttatcttctatggaagcgtgcgaacgaaattcatcaaccatcaatactctggggagaatcctcttagattgctttggtaagtagcttttaaactctttcaacgtacgaataacggtggtcaaagatacctgacaatttttcgcaataaaagataaagatactttttcagtcagtaaagaagcaattttatatctgacatgattcgcgattgaatgtctgggttgaacaaaataactttgagccgtccaatgggttcgacagtttttacaggtatagcgctgcttttttaagcgcataaccaaaggcatgtgattgtattgttcaaagcggacaatcgtttccttcttcccatttttcactacaattactttcccgtttccatctaccacagtagaaccacaatttctacaggtatggggagcaggtgagaaaacagcatcgacgatcaacgtctttttcttctgaaaggtctcgtaagagacctctgtaatcatcaaatctttctctattaatcgcagcatttttttgatagaatcattcatatagcatatcgtcctctcagttgtttattttgtcgtgatttaatcatactagagaacgatatgttttttaatacctaaaataaaaatggggctgaagaatcaattctgattcatcagtcccataaattatagagccaaaaatcatcggggtgcttttaacgtttaagcggtcaattgacgccaatgattggcgcactaggaatggtgtagcctttagcagtcagtgcatcgattgaagccgctaaaaactcttcttttagtttccactgagttccgttggtaacatacatcgttgtccggatcgcaaaattattgttgccaaggtcgacaacaccaaaaattgctggtttcgtttggatctcttcctcgtgagcagcagccactgtttgattgacttcgtcaatgatcgaccggatatcatctaagccctctgatggcaagatacgcacatctacaacgacttgcatattggctcgtgaagtgttgctgatcgtagtgatattccgattcgggatataatggacagtcccatccacggattttaactgaaccgttcgaataccgacagctgtaactgttccttctaatgacaaattcgtcaaacggatataatcgccgacattgatttgttgctcagtaatgataaaaaaaccagtgatcagatcattcataaagccttgagcacctagtcccagtgccaccccagcaatcccagcccccgctaagagtgaaccaacaggcacgccaatcgttgacaataacgcatatacaaagaagaaacctaatgtatagtgtacgatattgcggatcagcgcatggatcgtgttgattcgactggcattataggttccttttttctcgtaggaacgataaattcgttcgatgacataattgctgattttcagcaaaataccaaataaaataatcaaaaaaagcagcatcagaactttttggatcaagataccaacaatagcctcccaatcaatgttttgccaccatttctgcaaggcattcaattgtttggcggcaggctccgtcaagctggatcctgtcgaatccgttgtagcatctgtcaaaagtcgtaacataaaatccctccatctatcaataagtctattttataggagaaaaaacagaaatgcaaaattcacttgttaaatttttgtaaaaagatgaacaaataagggaatatcattagttagcaaagaaacagcaaaaactcgtctcttggcatagaccagtcaagagacgagcacgagtacatgtgatcatagaattacgataagtgaacacctttatcgacaaaaatcacttctccgatgataccgctagacaatggactaatcagaaaggcacatgtgttgccgacttcttcgatggtcacaccaacatgatcaggagtgcgatcttcagataattggatcagcttttgataatcttttacacctgtcacagccagtgttttgattgcgcctgcagagatggcgttgacccggattttttgcggggataattctgcagctaaatagcgaacgcttgattcgagagcagccttagcaatccccatcatgttatagttgggtacagcacgttctgaacctaaataggtcaaggtaacgattccggcattttctgccaagaggggtttggcatatttagtaacagcgatcaatgaatagctgctgatatcttgtgctagtgcatagccatctcttgatatatttaaaatatcacctgaaagatcatctttgttggcgtaagcgacagcatggacgacgccatggatttcgcctgcatagtctttgatggtttcaaaagctttcgcgatactctcatcatttgcaacatcacattcaaccgtatactcattttcctctagtagccgttcaagaggttttttcatgcgttcgttttgatacgtatagatgacttcagcgccttgttcttttagcgcttgcgcacagccccaagcgatactgcgtttgttggctacgcccatcacgacaactttttttccagttaagaaactcataattccactccttaatagtttgcataataatcaataatgacgatcgatagtgggtcccactatcatgatttctaattattattcataattgtttgattgtcaaactatttttttattaataaatatttagttgcgaaaaaatcagaactatgatactttgataatcaaactataatatttttttaagcaaggaaggaaaccccatgaaaaaactattgacagaaacagaagtcatggacttgattccaaatcgctatccgatcatttatatcgattacgttgatgagattgaatcagggaagaagatcattgccacgaaaaatgtgacgatcaatgaagattttttccaaggacattttccaggaaatccagtgatgccaggagcgttgattttagaaacattggcacaagcaggttcgatcttgattttgaaatcggatgaatttcagggaagaactgcttatattggcgggatcaacaaagcaaaattccgtcaaaaagttgttcccggcgataccttgaaacttgtttttgagattacaaaaatcaaaggttctgtagggacagccaatgctgtggcaactgtggaaggaaaaaaagcagcggagtgtgaatttacctttattgttggagaacaaaaataaaataaagaccagtgcctttaagggaaattttcaaaggcattggtcttttttgcttacttagcttcttgtaaaatcttgatggatttgattttgacaggatcttttggcgtagagtcttctccgttgctattcgcctcaccggtcgtttcggctttggcaattttgtctacgacctccattccttcaatgacctgaccaaagactgtgtacttaccatctagtgtcggagcaccaccatctttgtaggcgtcaatgatattttgaggataaaattggattgctcgtccatcagagacatcatcatggttttgaacaataaagaattgacttccttggctgttgggagcgctggattttgccatcgataacgcgccgcggatatggtaaagctgtttggatatttcctcgccaaaccctttgccccaaatgctttctccaccagttccgtcaccgttagggtcgccgccttggatcataaaatcttcgacgattcgatggaaagtcaagccatcgtagtagccatttttggcatgagtcataaagttttcgacagcttttggtgcaatttctgggaataatttgattttgatcgtgccttctgtggtctcaagtgcaacaagatcttcattttcttttacttcagtagacaactgcggcagttccagagaatttaagtctacagattctgatgtggttgttttatccgaagaactagaagtagttgttgtatcattgcaggcagttaatagaaagaggctagttgctgccgccaacgttagtatcatttttttcatttgagtaagatcctttcattactagactgtctttatcatatcaaaattaagctggagtgaaaagcaggtatctattaaaaccaataggaaaggtgtagaccacttatcggttgtttgctataatgaaagaggattcatgaacaaaaaacggatagaatttttaggaggtttgacggatgggaaaattaggtatttcagtttatccagaacgatcaacgtttgagaaagacaaggcttatcttgatttagcacacaaatacggctttaagcgtgtgtttacaagtttgctgcaaatcgaagatgataaagaaaaagtattggcagatttcaagcaggtagtggattatgccaatcaattaggaatggaagtcatggtggacatcaatcctggtctctttgatcaattagagatctcgtatgatgatctttcattctttgatgaaatgggtgcttatggtgtccgtttggatatcggttttaccggtgccgaagaagcgcgtatgacgcgtaatccttatggcatcaaaattgagatcaatatgagcagtgggacaaactacgtagacaatatcatgagttattcgccaaatacgaataatttattaggctctcacaatttttaccctcatcgatattcaggtttgggttatgaccattttgtgtattgctcagaaaaattccgtcgttacaacttgaacacaatggcttttgtgaattctcacgaggcaacatttggtccttggccaacacaagatgggctttgttcgttggaagatcatcgtgatctgccaatcgctactcaagtcaaacatttggttttgacaggattaatcgatgatatttcagtgggaaatgcctatgcatcagaaaaagagttagctgcaatggcagaagccttcaatgcggactatcctaccttaaaagtagatgttgctgaaggaatcacggaagatgaacgcatctgtttgtttgataatcttcatggttatcgcggggatcgctcagaatatattttgcggtcgacgatgactcgaatttactacaaagataagccattcccagcacatgatacccatgatatgactcgcggtgatattttgatcgataacgtcggttatgggcaatacaaaggtgaaactcagatcgcattgaaagaaatgaagaatgatggccgtgtcaatgtcgtaggaaaaattgctgcagatgaactgtttctactggatttcttgaaaccatggtcaagctttaaactaaaagacagcaaagacgaataagacgctttgtttttctaaagaactgctctttttgagcggttctttttgtttaatagctttcgtccgtgcagtgtggggaaaaaaggcgcgtttctacatgtggatgagattgatggtaagaaggtgaggactgttgaaaggagccgcctgctagcaaaaatttctttactctttacttctctgctctttacatagcagcacttggtagcgcttgttgaagtgttagtttgactgtttttcgttttggtcctattgacaaatcaaaagtaaaaggggtattttgtactagaatgttttttaggagggagcaaccagaacggtgttttttattattaaaacgttattgttatttatcgttaccattcgtctggctggttttttgtcgattttcttactgattgctattttccagcaaaagcggaaacgacaacacatgaccagtgaagaatgggagacatattttaccaaattaggaactgatggctttctttggcgcttatatggctgtttttttgccgttttaggggtctttgcggtcatcaatacattttatttttggcatcagatgtgggtgtatgggatcacgttgatgttggcgggcggatttcatctttatttcaaatatcgcctgaataaggagcagattcaagcgcgtttcttgaaataaacaaccaataattatattatgtaaactagttgtcgaggaggaacaaaatgaaactacgctggaagatcgccattttagtaggggtgcttttgatagtaggcttgggctatgccggaaattatttttataattacgcagttgtcccatcagaaaaagattttttaaaaggtgatacctctggaacggacaaaagcaatgcgaatcctgaagcggaggagtggtttaccgctccggaaaatcgtcaaatgtggcaacttgaatcctcagatggattgatgttgtccggaatttacttgcctgcccaaaaatcacagcacaaaacagtgattgtcgcccatggttatatgggaaacgcagagacgatgggagtttatgcgaagatgttccatgatctaggatataacgtattggttcctgatgcccgcggtcatggagaaagccaaggcgattatattggctttggttggccagaacggaaagattatgtccaatggatcgatcaaatcttaaaagaaagcggcaaggaagaatccattgttttatacggtgtaagtatgggagctgctaccgtgatgatgaccagtggcgaaaagttgcctgccaacgtaacagcgatcattgaggactgcggttatgcttctgtaaatgaggaattgagctatcagttggatcaattatttggtttgccagcatttcctttgatcaatgtcactagtctggttaccaagctaagagctggttacttctttggcgaagcagatgccgtgaaacagctgcacaagaacactcgtccaatgttcttcatccatggtgattcggatactttcgttccttattcaatgttggcagaggtttatgctgctacagatgcgccaaaagaaaaatgggtagtcaaaggggcggaacatgcccaaagctacacgaaagatccaaaacgttaccaggaaaaaattgcggcattccttgaaaagtatgatcacttgccagaatagcaaaaaaagagcgaagatccgtagatcttcgctctttttgtaatgagtagcttataaattagcaaatttttctaacaaacgaatcatttggcaagtaaaaccatattcattgtcataccatgcaacagttttgaccaattggaagtctcctgcagtagttacttctgtttgtgtcgggtcaaagattgatccttgcgtcgtaccgataacatcgccagagacgatttcacggtcatcgtagccaaaagaaggattgtcgatcgtgtgtttcttgatggcttcattgacttcttctgcggttactttttgtttcagaatcgataccaattctgttaaagatccatcgacaacaggtacccgttgtgcgtgtccttgaagtttgccatttagttctggaatgaccaaaccaatcgctttcgctgctcctgttgaatgagggatcgtattatcagcggctgaacgcgcagctcgcaggttgcctccccgtaccgggccatccaaaagcatttgagtagaagtgtaggcatggacagtcgtcatagttcctacttcgatcccaaattcttcatttaggaaataagccattggagctaaacaattggttgtacaagaaccagctgaaatgattttgtcctctgcagtaagtgtatcactattgacattgtaaacgatcgttttcatttttcctgctggtgcagagataacgacacgttttacaccggcatctaagtgtgcttgtgctttttcttcagatgtataaaagcctgtacattctaaaacgatatccacgccattttctttcacccaaggaattttgctggcatcaggttctgcgtagacttttgtttcttctccatcaacgacgatcgcatcatctgtggcagtgactgtgcctggataggtaccatgagttgaatcaaactggagtaactgggctagcatgacggggctcgtcaaatcattgatcgccacgacttcgatatcatctgatacttctttgattcgacggaaggccaagcgaccgatacgtccgaatccatttattcccacttttactgtcataatctattgttcctcctcttttttgatcttacaattaaaattctgctacgaaaccaggattctgtcaaagaaaaacccttaaatttttatctagttctttgggaaaagaggcagaaaagatagacaaatggccttgcggtcgttacaattaaatagactttcttaaaggtgaactttggcctgcaaatggcatgaattgtattcaaattggtttattagaaggtaagaagagagaatggagggcacataacatgtccatgtttttagatcaggtaacaatcgatgtcaaagctggtaaaggcggagacgggatggttgcatttagaagagaaaaatacgttcccgatggcggaccagccggtggggatggcggccgcggtggtgatgtgattttagttgtcgacgaaggcttgcgtacgttaatggatttccgtttcaatcgtcattttaaagcacaaccaggtgaaaacggaatgagtaaagggatgcatggccgcggagcagaagatacgtatatcaaagttccccaaggaaccactgtccgcgatgcagacacaggtgctttgctaggagatctgttggagcaaggacagacgttgacgattgccaaaggcggccgtggcggtcgcggcaatatccgttttgcttcgccaaagaatccagcgccagaactagctgaaaatggcgaacctggccaagaaagaaaaattgaattggaattgaaagtactagctgatgtcggcttggttggtttcccatccgtaggaaaatctacattactttctgtcatttcttctgcaagaccgaagattggtgcctatcactttacaacgctagtccctaatctagggatggtaacgacttcagatggtcgtagttttgctgtggccgatcttcctggattgattgaaggggcatcgcaaggtgttggattaggtacacagtttttacgacacattgaacggacacgagtgattttgcacgtgatcgatatgagtgggatggaagggcgcgatccgtatgaagactatcaagcaatcaatcaagaattagcaacccataacttacgcttgcttgaacgtccgcaaattatcgtagcgaataaaatggatatgccagaatcagaagaaaatctggtgaaattcaaagagcaattagcaaaagaacaaaccgatgaattcgcagatcctttgccgattttcccaatttcaggtgtcactcgtaagggaattgatgctttactgagtgcaactgcagacttattagaagtcacaccagaattcttattgtatgatgaggaaatcgaagaagaagttgttcaatatgggttccattcggatgaaccagaatttaccattgatcgtgatccagatgctacttggatcttgagtggtgaaaagattgagaaactcttccaaatgactaactttgatcatgatgaaacagtcatgcgttttgcccgtcaattacgcgggttaggagtagacgaagcgttacgtgcgcgaggagccaaagatggcgatatcgtgcgcatcggtaattttgagtttgaatttgttgaataagattagttgagtaagcttagttgctgctttagatacagttaaagcgttagcgcctaatcctatcaataggaacaactcttgatacaactagggaatctttataaaaaagggctctttgtcaataaggactgatgggttgtacaaaatcaaatctgggtcagaatgaacctcattctggctcagattttttgttatcttactttgattaattgattgatcaaaaagattctaattctcatgttctcaaatgatttaaatccgtaggatactcgtttcattgtctttatatgggtattcttcgcttctatttttccattggtgtaaggatagatcatcgcgttggtgatgccttcttcataggtcaaaaggttttggagcttttcccgaaagccgtcatctaacgtttcgggaagttctgccaataaggagaaaaataagtcagggtctttgtctcgaaaggcttcaactaattcatgaaaatagggatacgcctccttcagggacgtagaaaagccaagcaatcgatcaatcatcatcgcttccgtaagaaatgggtattttggtgctcgaaaacttttccatgttttgtattcataatggttgatgtttgcacgattttttagcaaaaagcgccagttctttttcagtttttctgcctgacttttctgtcctactttacgaagttcattcatttcacggatacgcaactcattaaaggcttgattcatgtgtttgataatatgaaaccgatcaatcactactttcgcatttggcagaatacgtttggtaagctggaagtaggcggcgttcatgtctgtgactaaaaattttacttcttcaggattagtgcagcctaagaaatagcttgttaatcgaggcaatttacgcgtaggcaagacatcaattaattgtcctgtttcgccatctgcgcaaataaagctcattttatcttctatggaagcgtgcgaacgaaattcatcaaccatcaatactctggggagaatcctcttagattgctttggtaagtagcttttaaactctttcaacgtacgaataacggtggtcaaagatacctgacaatttttcgcaataaaagataaagatactttttcagtcagtaaagaagcaattttatatctgacatgattcgcgattgaatgtctgggttgaacaaaataactttgagccgtccaatgggttcgacagtttttacaggtatagcgctgcttttttaagcgcataaccaaaggcatgtgattgtattgttcaaagcggacaatcgtttccttcttcccatttttcactacaattactttcccgtttccatctaccacagtagaaccacaatttctacaggtatggggagcaggtgagaaaacagcatcgacgatcaacgtctttttcttctgaaaggtctcgtaagagacctctgtaatcatcaaatctttctctattaatcgcagcatttttttgatagaatcattcatatagcatatcgtcctctcagttgtttattttgtcgtgatttaatcatactagagaacgatatgttttttaatacctaaaataaaaatggggctgaagaatcaattctgattcatcagtcccataaattatagagcctaaaaaagcggagttatgagatgacttcgtttttttatttgttttctttttcaaatagacaagatactggtaaaataaagaaaagaaagggagcgaaaattatggcaaaacgtgtgattgtaatgaatttcaacgcaaactcggaagcattccaagcattttctgaagtaaaacgcatgcatatggaacgaaaaatcaaaggagaacaaatggctgtgatcactcatacagaatccggtgcgcaccagttcaagatcgaagattttctagactttaccggtaataacaaagcatcgactggtggaatgattgggatgctagtaggaattctgggaggaccattaggaatcatgttaggctggttcggcggtagtatgattggtgcgacacgagacgccaaagaaatccaaaatgcacaattgctgtttgaacatgtcagcacccaaattggggtaggcgacactggcttattgttgattgcagatgaggaagacaatcgtccactaaatcagttgatcatgaatcaattaggtggggaaattactcgctttgactatgatgaagtagaagcagaaattgaaacggctaaaaaagtcgaagaaaaaacgaaagcacaagcgcaagaagattggaaaaagtctcattcccaatctgaagaagaacaggaataaactataaattgcatctgaccttcgtttccgctaaaattgggggaagatgaaaggaaagaagtatatggaattagaatttttaggtaccggtgcaggcgtaccagcgaaacatcggaatgtaacaagcacagcactgcggttacttgatgaacgcaatgctgtttggttgtttgactgtggtgaaggcacacaaatgcagattttgcattctacgattcgcccacggaaaatcgaaaagatattcattactcacttacatggagatcatatttatggattgcctggattgatcagcagtcgctcctttcaagggggcgcttcaccgttagagatttatgggcccataggtattgaagaatttgtgcggaccgtgttaaaaatttctcaaacaaaattgagctacccgttagtttttcatgagatcacaaaagaaggcattctcttcaaggacaaacagtttaccgtttcttgccgtcggttggatcacggaattgaaagctttgggtatcgagttgaagaagcgagtcaccaaggagagcttcaggtagaagctttgactgcattaggaatcaaaccgggtccagtttttggtcgactgaaaaaaggcgaaatcgtcacgttggaagatggacgacaaatcaacggaagtgactatgtaggtgaagcgaaaaagggacgtaccgtcacgattttaggagatactcgcctttgtgccaattcgatcttactggctgaaaatgcagatgtactggttcacgaaagtaccttcaataaagatgaagctaaaatggctcgcgcctattttcattctacaacggtgcaggcggctgaagtagccaaacaagcgcaggtaaaacgattgcttttgacgcacattagtgcacgctatgttgggaaagatattacaattctggcaaatgaagcaaaagctgtgtttcctaatacggtgatcgtgaaagacttcgatgtcatcgatgtcccatttgcagaaaaaggagatcaagatgttgttagaaaataaagtaattgtcgtaactggcggatctgctggcttaggggaacaaatctgttatgaagcagcgcgtcgcggtgcgatcgtggtgatttgtgcccgtagaagtcagttgatcaacaaagtcaaagaacattgtatgacattaagtggcaaaccagcttatgcctttcaattggatattgcagaccctgaaagtgtcgaaaatgtcattgcttcgattcgtgaaaaggtcggaaaagtggacattcttgtcaacaatgctggttttggtatttttcaagaatttacagaaatgaaaccagaaacgatccgcaatatgtttgaagtgaacgtattagggatgatggtcttaacacagcaaattgctttagaaatggtcgatcagcgctctggtcatatcatcaatgtggcatcgatggctgggaaaattgctacaccaaaaactgcagtgtattcggcaaccaaatttgctgtattaggtttttcaaatgcgttgcgtttggagttgaaacctttcggcattcatgtgacaactgtcaatccggggcctatcgaaacagccttctttgaccaagcagatcctagtggcaattatttagcttctttagggacatttgttcttgaaccaacaaaactggcaaagaccatcgttaaagcgatgattcatccaaaacgagagatcaatcgcccacaagtgatgggagtagctgcaaaattctacacactattcccagctattggggactacttggctggaagtctattcaataaaaaataggagttgtttttgatgaaaaatcaatggcgagtaatcgtaggtattttgttggttttagtgatcgtcctttttgcggtcgccaataatatgactgttccaatcaattttggctttactagcatcaaagcgcctctgatcttgattatcattggggcggctttgttgggggcactgattatcttactagtgtcaactagtacgatgttccaacaaaagaaagaattaaaaagattacggaaagaattggctgactttcaacaaaataatgaagaaaaatttcaagaacagcgtgaggtattagaacgggaatatgcaaacaagcaagcagacctcgccttgagggaacaacaaattgctgaagcagaagcaaaaactgcggcagttgtgcctggtgaaccaccaattatagaaaatcgtcaagatacgtttccagagtaatggtaagcttgcactcttgtttttcaaaagagggttttgggactccaaccagaacggtaaatctctgaagtgaggcgcaagattggctcaccactcttttgcaacaaatgagcgaaataaaaacgacatccttcggtggtctttcgataaacgaccgaaggatgtcgtttttattgtactagaaataggatagaagctggtagtgcttttttggtcaacgcttttcttttctccaaaatatttgctataattaccaagttaggagtgattgtgtgaaacgcgcgaactttcattggctgagaccacaaaaaagtgaattatcagctaatttcgaggaaatgatccaagcaagaggtttgtcaccattaataggtcaattattatggcagcggaatattcgaacagcagcagacttgcaaagttttttagaaccggatttgcagggacttcatgatccatttttgttttatgatatggaaaaagccgtcgatagaattcagacagcgatcatgaatgaagagcgtattctgatttatggagactacgatgctgatggtattacgagcacgactgtcttaaaagaagcgctggaattattgggtgcggatgttgaattttatctgcccaatcgctttaccgatggctacgggcccaatctttccgtttatcaagataaaatcgcagctggtgtgcaattgattataactgttgataatggtgtatctggtcatgaggcattggcttatgccaaagaagcacaggtagatgttatcgttacagatcaccatgagttgccaccagaattacccgatgcgtatgccatcattcatcctcgccatccattaggaaattaccctttttcagatttggcgggtgtcggagtcgcattcaaagtcgctactgcgttattagaagaagtgccagtcgaattattagatctcgtggcaattggtacgatcgccgacatggtgtcgctcactggtgagaatcgcattctggtcactaacggattaaaaatgatccagcaaaccgaacgtgcggggctctcggcactgatcgaagtgagtggtctgaagaaacgggcaatcaatgaaacggatattggttttgccatcggacctcgtttgaatgcgattggacgcttggaagatgccaatcctgcggtaacacttatgtcgacatttgatccagaagaagcccaattgttagccaatcaattagatacgatcaatcttcaaagaaagcaatatgtggaaacgattttgaaagaagctcagaatatgctttccgattcaaatcaagtccatttaattgtgggagatgattggcatgaaggtgtcttagggatcgttgctggacgattgatgcaacagactggcagaccggtccttgttttaaccaaaaaaagcaacggtattgctaaaggttctgggcgcagtgttgcagcattaaatctatttgacatgctctctggaatgcgtgaaatgtttaccagctttggtggacaccatgcggcagtagggctcagtgtgcccattgatcacctttcgatgctccaagaacgtatgaatcaatacgtggtcgataatcggatcgacctttctagcgggattccgttaccgattgatgaagaattgtctttagcagaaattacgacaaattttatcgagtcgctgaaaattttagctccctttggtacagacaacccaatcccaaagtttttgattacgaatatttctgctgataatggccgacaaattggtacagagaatcagcatttaaaagtcagtcttacagatggagaaaatggtcaattagatgtgatcggttttggttttggatcacagctagtagaatttgagagtgaaggattggccgttgtggggcaattatctgtcaatgaatggaacggcaagaagaaaccacagctgatgttggaagattttgaagtcaacggcatacagctgttcgacttgcgttcaaagaaaaatcggcaagggttgatccttgatgcccaaacattaggtattgctttttcggataaattgccttcagagatagaacgattttgtccgaacgttcatgtttatcaaacgttagacgatttgacagctttttttggttcaggaaattatacgcaactcgcttttctagactgtcctagcgagaaagagcttttgagaaaaatcattcaagaaatacctgtcaatcgtatctatttgattttagtatccacagaggatgcttatctggatggtgtcgggactagggaacaatacggccgtttgtttcaactgatcaatcagcagaatgggattgatattcgctataaactgccaatggtagctaactacttgcagattccagaaaaattattaatttttatgattcaagtgttttttgatttgaaatttgttacaataaaagatggcgttttgaaaaaagtccctgatccagagaataagccgcttactgagagtgtgttgtatcaacagcgacttgcaaaaatcaaaacagaagaagatttactaatgagtgatttatcaacgattcgcaaatggttgatatcttaggaggaaaaaacatgaatttaaaagactatattgccagcattccggattatccgcaagaaggaattgtctttcgcgacatctctccattgatggctgatggagaagcttatcgttatgcaacacagcaaatcgtcgagtacgctcaggaaaaagggatcgacatggtggttggacctgaagctcgtgggtttattgttggttgtcccgtggcgtatcaactgggtgttggttttgcgccagtacgtaaaaaaggcaagctacctcgaaaaacgattgaagcaacataccagaaagaatatggcgtggatattttgacgttacacgaagatgcgattaaacctggccaacgggtattgatttgtgatgatttacttgcaaccggcggcacgattaaagcaacgatcgaacttgtggaaaaattaggcggcatcgtagttggctgtgcttttctgatcgagttgatggacttgcaaggcagagacaaaatcactggatacgaaattaaaacattgatggaatattaatcgaaaaaagccagatcaattttgatctggcttttttttgtttgtttggcagcaacactgaaataatcgacctactgttcgtaatgataaaaatcatggtcgtggtaataagtttggtttctctttcgttctgcttggcggaatttcttttcatcccatagcatgaaccacagcatcatcaaagggcaaaaaatcagaactgcactgagtacgccaaaataaccaataatgatccctgttaacaacacccacaaaataaaaccaaatcgacgaactgctttcattattttcactccttataaaaatgcgaacttatgtttgtaaaactattatacgaatgtttgttcggtttgtaaagaggaaataaaaaaaatcttcgaaggttcgaagatttaaggaatcgattaaagtaagtgacggtagagaccaacgactaagcctaaaatcgttacatctggcaagatgataggttctaggtaatcattttccggttgcaaacgaatgtgatcctgttctttgaaaaatctcttacaggtggcttcatcttcatccgtcattgcaatgacaatgtccccgttttgagcactttgctgtttgcgaacgatgacttgatcaccgtctaagattccagcgttgatcatactttcaccgcgaatcgtcaacatgaacaaactgccgatgctatttgctaaatcaggcggtatcgggaaaaaatcggaggcgtcttctacagctaagatcggttcaccagccgtaacgactcctagcattgggatcgagtttggctgcacatcgattttttctaatccggaggaagtcaattcaatcgctcttggttttgttgggtcgcgtaaaatcaagccttttttttcaagcctggataaatgtccgtggacggtagaagtagaggatagctgaacggcttcgccaatttcgcgaacagtcggcggatagcctttttcagtgactcgtgtatgaataaacttaagaatctcgatttgtcgattttctgttcgttttgccaaaactgacaccttctttcatttgatagtcttagtgtaccataggagaaacgacaattcaaacaaatgttcgctttttgttgctattgtttttttgtcaggttttgtataagataaagtagtgaaaaggaggtgtcgaaatgttatccaaagaaaaattagcccgcattaatgagctagccaaaaagaaaaaagtgcaaggtctatctgctgatgaaacgatcgaacagcaaaagcttcgcgaagaatatttacaagcttttcgtggaggaatgcgacaccacattgaaggaatgaaaatcgtcgatcctgaaggacacgatgtcactccagacaaattaaaagaaattcaaaagaaaaaaggattgcatggcagataaagatgaattccttttcattcctattgaaatcctgaaagaaatcccgtataatatgagatgtaataaaggtaaaaaaaacctaaattaggaggaattaccattgtttgataaaatcgatcaattaggtgtcaacacccttcgtacattgagtatcgaagccgtacaaaaagcaaattcaggtcatcccggtctgccaatgggggcagcgccaatggcgtatgccttgtggaccaagcatttgaaagttaatccgaccacttctagaaactggatcgaccgcgaccggttcgtcttgtctgctggacatggttctgctttgctttacagcttactgcatgtttcagggtatcaagtaaccacggaagacttgaaaaatttccgtcagtggggcagccgcacaccaggacacccagaagttgggcatacggatggtgtggaagcaacgactggtccattaggacaaggaatcgcaatggccgtcgggatggcgatggcggaaaaacatctagcggcgacatacaaccgggatgaatacaatgtgatcgaccactatacgtatgcattatgtggcgacggcgacttgatggaaggtgtgtctcaagaggcagcttcaatggctggtcatatgaagctggacaaattgatcgttttatatgattccaatgatatctcattagatggacctacttcaaaagcattcacagaaaacgttggtgcccgttttgaagcttacggttggcaacatttgttggtcaaagacggcaatgacttagaggcaatctcacaagccattgaagcagctaaagctgaaacagagaaaccgacattgatcgaaatcaaaacagtcatcggttacggtgccccaaatcaaggaacctctgctgtccatggtgctccattaggtgcggaaggtatttcagccgctaaagcaatctatggctgggagtatcctgaattcaccgtgccagaagaagtagcggctcgtttcaaagaaacgatgatcgatgaaggccaaaaagccgaagcggagtggaacgagaaattcgctgcttacaaagcggcttatccagaattagctgcgcagttcgaacaagcagtggctggcgaactaccagcagattgggatgcagaactgccaacttatgaagtaggcagctcacaagcgagtcgtgtttccagtaaagaaatgatccaagctctttcaaaagctatcccaagcctatggggaggatcggccgatctatccggatccaataatacgatggtcgcagcggaaaaagattttgaacctggtcaatatgaaggccgcaacatttggttcggtgtgcgggagtttgcgatggccgcagccatgaacgggatccaacttcatggcggtacacgcgtgtatggcgggacattcttcgtctttgttgattacttgcgtccagcagttcgcttgtcggctctccaacatgcgccagttatctatgttctgacccatgattctgtggctgttggtgaagacggaccgacccacgaaccaattgaacaattggcgagtgtacgctgcatgccaaacgtgcaagtgatccgaccagcagatggcaacgaaactcgggcagcttggaagatcgccttgcaaacgacgaataaaccaacggtcttagtgttgagccgtcaaaacctgccagtgttagcagggacgctaagtggtgtcgaagaaaacgtggctaaaggtggctatgtcctttcaaaacaaaccggtgagacaccagaaggcatcttgatcgctactggttcagaagtgaatctagcggtagaagcgcaagccaaactcgcagaagctggagtggatgtgtctgtcgtatcactgccaagctttgatttgtttgaagcacagtcagaagagtacaaggagagtgtcttgccgaaagccgtgaaaaaacgggttgccatcgaagcagcttccccatttggttgggatcgttacctaggctgcaaaggcaaagtcatcgccattgatcattttggcgcttctgctccaggaaacaaagtattggaagagttcggctttacagtcgaaaatgtggttgccactttccaatcgatcaaataagcgtaagaaacaagcgaaatcgcagctgatttcgcttgtttttttaaagtcttttcgtttttaggtagaacaagatgtttttgcgaaaagacttttaaaaaactattgagttgcttaagttgcacagaaaaaattttttccgtataatgtctatattgttgaatagtattgggacgatggaggaaaagaatgaaaaattatcaaacccgcagtgaaagacatatccaccaacaaaaagcagtgatgccacgaccaagtaaacgagcagtggtttcttttattggggctggattagcattgtcaccagcggtggtcacgctacttcccgaacaggtccaagcaagtgaatatcagaccactagtcaaggaatcgctagttttatcgaacagattggttggtcagcacaagacgttgcggccaataatgatctttatgcatcggtgatgatcgcgcaagccattttggaaagtggctatggctcatctacattatccaatgcgccttactacaatctttttggggtcaaaggatcatataacgggcaatctgtctatttgcctacagatgagtatatcaatggacaatgggtcgtaatgaatgaaccattccgccaatataattcctactgggagtcttttcaagatcacgccaacgttttaagaagtacaagcttcacttcaggtaaagcacattatagtggggtctggaaaagtcaaacgacttctttttacgatgcgaccagctatctgacaggacgctatgccactgatccaggttacgcacaaaaattaaactggctgattgaaacgtatcaactaactcgttttgatacaccaagtactggtgccacaacgacttctgtaacgacaacgacaacgcaatccacatcgacgacaacaacgacacaaagtacgggacaaagttatgtcgtagcatctggcgacagtctttgggatattgcttcacgttttggaacaacggtggatcaaatcatggctgccaatggattaagcagtgacttgatcgtcgtaggacaggaattgatcgtttgattttcgctatttattagctaaacgccaaatgaaatttcacaaaaacttttgtttttgttctcttttagtaactaaaagaagcaaagcaaaagtttttttctttgtgaaaaaaacataaatatttggaaaacgctaactttttgttcgcaagtctgccgttttttgggtagaataggaatatgaactggagggattgcaaatgacaaagatttatcaatctgttaccgagctagttgggcatacgcccatcgtcaaattaaacaaggtggttggagaggattccgctgatgtctacgttaaacttgagttttataatccagggagcagcgtgaaggaccggatcgctttggctatgatcgaaaaagccgaaaaagacggctctttgaaagcaggcaatacgatcgtggaaccaacttccggtaatactgggatcggcttggcgatgatcggtgcagcgaaagggtaccgagtggtgatcgtgatgcctgagaccatgagtatcgaacggcgcaagctgatgcaagcctatggtgctgaattgattttgacaccaggctcagaaggaatcacaggttcaatcaataaagccaaggaattggctgaacaagagggctattttatgccgctgcaatttgaaaatccggcaaatcccgagattcacgagaaaacaactgggaaagaaatagagaatgcctttgaatcaaaaggattagatgcctttgtcgctggtatcggtacaggcggcacgatcactggtgcgggtcgagaattaaaacgagtgtatccagacttaaaaatctatggcgttgaaccggcagaatcggctatcttagaaggcggacaacctggtcctcacaaaatccaaggaattggaaccggctttgtacctaaagttcttgatacagagatctttgatcaagcaattgccgtatcaagtgaagatgcgatggcaacagcgagagaagtcggccgtaaagagggcttgctcgtaggtatttcttctggagcagcgatccatgcagcactcaaagttgccaaagaactgggaaaaggcaaaaaagtcttagcgatcgtcccggacaatggagaacgctatctatcgactgctttatatcaagtggaagaataacaaggaaagcgggcattggcagaatgcctgctttttctccccttttcttaaggactgtggaatttttcgtgtttgttttgtggttgattaagaatttttagagaaagctgtttgaatttttaccatctacatagtatgatattacagataagagaattggaggaactcctgtgaacacgatatatgatgaggcaatcaaacaattaaaacaagaaaatatccgtatcactccacaaagggttgcgatacttgagtttttggctagccacgcatcacatcctaccgcagaagaaatttaccgagcgatcgaagtccactttcccggtattagtgtagcgacagtctacaataatctgcgactgtttacggagatcggttttgtgaaagaaatgaactacggcgatgcatccagtcgctttgactttaagacagagccgcattatcatgcaatttgtcaacgttgcggcaagatttctgatttttactatcctggattggaagatgtcgaaatggccgcttcccaactgaccggatataaaatccaaagccatcgcttagaagtatatggattgtgtccagagtgtaaaggagaagaggaatgaaaattatttcaacggataaagcaccgcaagcaattggtccttatgtacaagcacggattgctaatggtttcttgtttgcttccggacaagtgccgttagatcctgttacaggagaagttgtgggagcaactatcgaagttcagacacagcaagttctcaaaaatatcgaggcaattttaactgccgccggtattacaccagatgaaatcgtcaaaacaacatgtttcttaaaaaacatggatgattttgttccattcaataatacatacagcacactttttcatgaacatttgcctgcacgttcagcagttgaagtggcccgtttaccaaaggatgtattggtggaagtagagatcattgctgtggtggcacaataaaggagtcaatgggacggtcgtatatatgcgcagtcccatttttgttgagaatggattttattcttgatgatgccaaaataaaattgaaaatggtttttatgtaacgatgggaaaagaggacaataagatgatttctttacaagaatatttagcccaggggcaaacaactgtctccaatctgcttttggaaaactatcatagccttggtttaaccaatgatgaatttgtattatggcttcagttgtatcgttaccacgaacaaggcaatgattttccagatttagcgatgattgctaaagggatgggaagtgagcaaaaagaaatctataaatggttgaatgagctattgaataaacagatcatcgccatcgaatccaagaaagattcagcagggaagatggtggattactatgagttttctggaatctatgaacgactggaagtttgtttgcggcaaaaaaatcagcaggaggaaaagcagagctatgattcaaaagtacgttcgctttatcaaatgtttgagtccgaatttggccgtccgctttcagcaatcgaataccagcgaatatcacaatggctggaagaagataaataccagccggatttgattcaatttgcgttacgtgaggcggttttgaatcaagcctacagtttgaattatattgatcgcattttactttcttgggaacggaaaaatattacctcgaaagaacaagtagaagaagaacaaaaacgccgtaaaaaacagtttatgcagaaagaaaatttggaacaaacgaatggaccggttcctaagattcctatgcataattggttagaaggggaataaaggagagttgccatgatcagtaaagcaaaaactatgatcgcattggaacaaatgtaccaaatgttccccgacgctcacggagaactgatttccaaaaatccgtttgaactgttgattgctgtgattttaagtgctcaggctacggatgtgtcggtcaataaagtgacccccacactatttgctgcctatccgacacctgaggccttggcagcagctcctgttgaggaaatcattgagaaaatacggacgatcggtctttatcgcaacaaagcaaaaaatatcaaggcttgtgcgtcccagcttatcgaacgattcaatggccaagtacctagaacccgcgaggaattagtgtcattaccgggggtcggaagaaaaacagccaacgttgttttgggcgatgcgtttggtattccggcaatcgctgtggatacccacgtcgaacgagtaaccaagcgcttacggatttgccgattagatgcaaatgtcttagaagtagaacaaacattgatgaaaaaagtgccagaagatctttgggtcaaaacacatcacacactgattttctttggacgataccattgcacagctagagcgccaaaatgtgaagtttgcccattattgacaatgtgccaagaaggacaactgcggatgcgcgcaaaaaaagttcagccacctcaatgagaggcggctgaacttttttttattcaggatttgtttcatttgtccctggagtagtcgacgaagatgatggcgtcgaacttgactccgaagaagacgatggtgtgctttcactttctgacggtggcggtgtagattgtgagctttcagaagaagattcaactggtggaatcgattcttccgttgaactgctagattcaacgatttcagaactgctttctggtgttgattcaggaagcgaagaagagctgatcgttgatcttgtgctagaacttggttgctggtaagtccctttgatgtaaagctcattgccgatccgggtcaaatctgcgggcattttccagtcgcggttctcaacagaggctgagacaaattgcatcaattcccgataaacatctgaggcaacatgagtactgctgtctgtgatcggcgtcattttatcattataccctgtccaaacagctaaagaaaaggatggggtataacctgcaaacgtgatatccgggtaagcaccgtttgacgtatccaattgagccaattgattgtcatcatagttggaagtcccggttttcccagcttggtaaagtccatcgatttgggcattggttcctgttccgacagaaatcacgtctttcagaatatcggtgaccatataggctgtcgtatcatccatcgctttttgaccttccactttgaaggagtcttcatcaactgttccatcttgcgaaacgatcttattgacatattgcggctcgtaataggttccgccatttgaaaaggcagcataagcagcagccattttcaagctagagatcccatacttggtgccatcgatttctgatgtgttgctggaaattgcattggactgttcaatgtttttgtattcaatacctaggcctttcaagaaggaagaaatattgtcagcacctacttcttcaaaaagctttgctgctggaacatttctcgattgagccagtgctgtccgcaaagtgatatttcccatatattgtcgatcccagttgtagattggtgtgttcgtccccacgtaattatagggttcgtccaaaatcatgcggcctgttgaattttgtaaaaattggaaggctggaccatagtctgtcagtggtttaacggttgagccaaagtcacgagtgacgttgactgctaaattattacctaagacaacatcgtcttccacatgacgagcaccgatttgcgcgacaactttaccactattaacatctaccagagtagcggctacttgcattttatcatctgggaaattgatgtattcgtcactattaacgatgtcatacaatcgtttttgggtattgacatcaagattcgtatagatgtccaatccatccgtatagacatctttgccggtttttgcttttacttcatcaatcacttctttaaagtaattgtcataatatttccattcgttatttcgttgcggatttttttgcaatccttctgaaatatcttcggctttggctgcttcatattcgtctttagtgattttttcattctcatacatggttaacagaacaagatctcgtcgctgtttagctttgtctgggtgagcatatggatcataagcagaaggggcgtttggtaatccagcgattaatgctgtttgagccaaatctagttgatccaatgtcttgttatagaacttcatggcagctgtctgcatcccatagacaccgttagacatgtacactttattgatatagtaggtcaagatttcttgtttggattttgtttgttccagtctgacggccatccaagcttcttgcgcttttcttcgcaacgtctgatcttctgcactagtagagaagaaggatagtttgatcaattgctgtgttagggtactcccaccttgcatgccaccagtcgtcacgttcgacaatgccgatccaatgatacggatagggtctactccaatatgttgatagaaacgacgatcctctacagatacaatcgcatcttccaattgctgcggaatttcattcgcagtgattttttcacgggtctcgctaccaaaatcgaggatcagatctccgtttgaggcgtagaacctggaggaagcagcagaatcgagctgtttctcatctaatggtggtgcatctttagcgtaccaccaaaaaagtcccatccctgataagagaccgagacatcctaaaaagaagagccccataaaggtacgaagtaaaatactgccaatcgttcgttttcctttcggctttttttgtttggggcctttatatgcagccgccgctttcttagaatcatgtcgagaagctctcgattgcgattctttcgccatactaatcattctccttcattgacaaaaattgatctactgcttttaaataaggaatacgcggagcgattcctgggatgatctcaatgccgtttttctctatataggcaagaggcagcgattttttacctgttgttttttgttgatgccactctgtgatcaagttgctgctcgtcaaaaaaaagcagcgttgcaagcttgagaaccataacaagacaaagcagactccttgctgcgtcagacagttttccatatgctgaatctgatgctcatgaaaatttttgaaggggaaagaggttttgttctgtgtctctttggcttcaaaatccaagtaatatccgcgataaacaccattatagtccgtggtagaggcttctcggaagtaagcttctttaatcacagctgcactgcggcggggataatccaccttaacgatctgaacaggtgtaggttttttatgaatgactgctgcttgacgattcaaataataggcattgctttgattaattgcttcttcaaaacgcattccgcggttcgcgaaagtttttggccgagctattttttcttgcaatttttgttttttaccgccatcataagcagaagactgaccgttagggtatcgaatgaccatgttattcacactcctaggcatcattataccaaaaagacgtttggaaagaaaagagatgactgcttaaacaatgaaaaccttatattttaccggctaccgcagctttgaacttggtgtatttcaagaaaaagatcctaaaatcaaaattattaagaaagtaataaaaatgtctttactttcttacattgaacaaggactggaatgggtgctgatcagtggcaatctaggagcagaaatatggtgtgcagaagtggtggagcttttgcaaaaagactatccagaaatcaaactagggatcatttatccgtttcaaggatttggtgaaaactggaatgaagcgaaccagcaaatgttgcaacgagtgcaaatgagcgctgattatgtgaatgccactagccatcaaccctacaaagaaccaagccaattaagaaatcatacccagtttctattggaacacacagatggtgcgttgctgctttatgatgaagaattccctggaaaaaccagcttttttttgaaagatgcgaagaaatatcgggaggatcatccttacgagatcgatcaaattacaatggatgatctgcaaaacgcaacatttgatagtaatttactttgatttctgagagttttttgatagaatggtctagaaagtgaaaatcatttggaaaaatcaatgaggtgtaaataatggcaaatctaatttttagtcccaaggatattcttcaacaagaatttaaaacaaaaatgcgcggctatgatccagtggaagtcgatgaatttttagacaatatcatcaaagactacgagagctacaacaaagagattttagcattgcaagaagaaaacgatcgtttgaatgcaaaaatcgatcaactttctaagaaccaagcgattgcatcacgggtccaacaagaagcgccaaaaagtcaaacagtgacaaattttgatattttgaaacgtttgtctaatttggaaaaagaagtttttggcaaaaaattggatcaagaagaaccagttacacgttcctcttcatacaacagcaactacacaaatgctgattttgaagacgataacgaaaaaacacgtcaattctaatcaatttgattgctgtggttttcgggtaattgcggcataactttgattatgctgaggaaagtccatgctcgcacaagctgagatgcttgtagtgatcgtgcctagcgaaacaataagctagggtacttgaaagagtaacggcaggaaaaatggctaaggcgcgagctatgccaaagtatccttgaaagtgccacagtgacgaagcaagacgggaaaccgtcttggtggaacgcggtaaacccctcgagcgagcaacccaaacaatggtaggggcgctttttgcacggaaatgaacggagcaaaaaggcaagtaattgcagatagataattacccaacgttttcttctccctgaggaagacgtggacagaacatggcttatagaaaatcacagcagatcagggaatccttccagcaacggaaggtttttttatatcaagaaggagaaatctatgacagaaaaagtatttgattgtgtcgcaaccgctgctagtgggttagaagcgctagttggtaaggagttgcgagatttaggcattgaatgccaagtagaaaatggacgggctcgtttcaaaggaacgttggagaccattgcaaccgccaatctctggttacgcacagctgaccgcattaagattgtggtgggagaatttgatgtatacacctttgatgaattatttgagcaagtcaaagcattaccttgggaagactttctgccgctagacgcagagtttcctgtggcaggtaaatcgatcaaatcgaagttattcagtgtgcctgattgtcaggcaatcacaaaaaaagcgatcgttaatcgattacgggaagtttatcatcgccctgcaagtgttcctttaactgaaagtggtgctttctttcagttggaagttgctttgttgaaagatcatgccatgatcacactcgatacgacaggaccgagtttgttcaaacgtggctatcgactagaaaaagggggcgcacccttaaaagaaaatatggctgcagcattagtcatgttgaccaactggcgcaaagaccgaccgtttgttgatcctgtatgcggttccggtacactgtgcatcgaagcagcactgatcggacataatattgcccctggattcaatcgctcctttgtctgtgagacatgggattgggttccagctgaagtatttgagactgtaagagctcaggcagacgaagcagccgattacgatagacaactggacattatgggctcagatatcaatggacggatgatcgaaatcgccaaagcaaacgcggaagagattggtctaggtgattccatcaccttcaaacaacaagcagtcaaagattttaaaacagacaaagaatacggcgtgatcgttgccaacccaccatatggggaacgtttaggagaagaagagacggtacagcgcttgtaccgtgaaatgggcgaagtctttcgaccattaaaaacttggagcaaatacattttgaccagtgaccttacatttgagacccactatggtgaaaaagcaaccaagaagcgcaaactatataatggtgcgttgcgtacggatttcttccagtattggggcagtcgcccaccgcgtaaaaaggagacggttgaatgaaagaacaagaatttctaaaagaattaaaagagctcgatttgctgtcacaagcaatgggaatccttggttgggatactcagacgggaatgcctgaaaaggccagcgaatatcgcagtgaagttgacagctacttgtatggcttgtatttcgaaaagaaagtcggaccaacgatccaagaagccattacttattttggtcagcaccctgatgaattatctgaagttggtcaagcagcttatcagctggtgaaagaagaatatgagctgcaaaaaaatgttcctaatgaattagcgatcgcagcttctgctgctacttctagagctcatactgcttggacgcaagcccgcaaagcgaaagatttctctttattcaaggaagcattagctgagaatatccatttgacaaaagaactgatcccttattggaaaaaaaaggaacggacaaattatgatgttcttttgaatcaatatgaaccgaacatgaccgttgaaatcttggataatgtgttttcacaagttcgtgatggaatcatggatattcgtcgccagttagaaaaaggtactccaccagatacaacgatcttatctcgtgaaatgacagaggcgcaacagcggaaattcatctcgaaagtcatcacagacttagggtatgatttttctcgcgggcggttggacaatacggtgcatccttttgcgaccggcattaaccacaatgatgttcgcttgacgactcgttggaatgaagaagatttttcgatgggaatattcggcgtgattcatgaagcaggccacggcatgtatgaacaaaacattgatgaaaaatttgaaggaacgccgatccacgaaggagcatccatgggaatccatgaatcgcaatctttattcaatgagatcattatcggtagcaatcgtaatttttgggagaaacaatacccttattttcaagagtgtgcagaaggaactttcgatgatgtttcctttgagactttctacaatgcattaaaatttacccaagcaagtttgattcggatcgaagcagatagcctgacgtatgttttgcatatcattatccgttacgagattgagaagatgattttcaatgaagaagtgaatgtggaagatctgccaactatttggaatgataaatatgaagaatacttaggcgtacgtccgcaaaatgatttagaaggtatcttgcaagacgttcattggtcagggtcaagttttggctatttcccatcatacgcgttaggatacatgtatgcggcacagctttttcatgcaatggaaaaagagatcgatgtcgatgctgtattggcttctgatgattattcagagatccgccaatggttgaccacgcacattcatcaatacggggcttctaaaaaaccaaatcaattgattctggatgcgacaggagaactgttaaatccgcaatatttattggattatctgcggaaggtttatttttctgtttatcaaatccgctaatgagcaagcctttcgttcactcgaaaggcttcttctcatctttaaaaaaaccgcacgggaaactagttagctagacgatagtctttattgactttaggttctgatactttgatggaatcggacgattgaatcagaatgctagcaatagaaacaagataaaaaagacaggagtttcaaaaaatggctgatatagcaccaatttatgaatatgccaaattgattttgggaactgatcacacagggcatggctttgatcatgtcaagagagtagccgcaatggccaaacagatcattgccgaagatcaactgcaagtagatgattatgttgtggaagcagcggcatttttacacgataccatcgatgataaggtggtgaaagatgtggtgaaagccaaagaagaagtgcagcaatgccttctcgctgctggagccacagcagaacaaatcagtcatatatttacaatcattgagaatctctctttctcaaaagagttactggcaggggcacaagtctcctctttagaaggacaaatcatgaaggatgcggatcgcttagatgcattaggcgcaattggtattttgcgtactagttactttggcggtgcacatcagcatccgatccatgaatcagagcgagcgccgaaaacgttcacaaaccacgctgactaccgaaaagggaccaccgtgatcaatcatttctatgaaaagttgtttttattgcctgaaaaaatgcacacgcactttggtaaacaagaagcactgcggcgtaaagactttatgacaacctttttaactgaattttatagagaatgggatgtttagtaatttttaatcttcagttcgattcctttgtgtttcctctgtatttatctataattataaataaggggagagatggatatgtattacaaacaagcgctgaaaccgaatgaattattacctgcactttctgattctggggaatgtttttttatcattcgagcagcattacccatccggaattatcaagttgccatttaccggtacgatgatgagtattttttattgcaagatgaacgtttatttaatcagatctctagtatttccagggaacggcaaggagatgaagaacagattctgccattcattgaagaagcattagaagacaatcactattttctagtggaaaaagagtttatccgcttggatttattgacgctacaaaaaatgacaaccattcaatcgtttgaaatattgttttacgaattctttgatttttgaggtgatgggtgatgaaaaaaacggaatacctaaccattgaggatgcagcactcgctgatttatttcttgatctgggtgataagtacagcaacctcgaattgattgacgaagaaaaagatttggatgtggtcgttttgtcaaatagcgactggcaatatcttttggaacaactggatgatgaagtcaaggagcaatttcttgcacagaccgagactgattttctagacgaggagtaagaatagaggggcaaatgcccaatgaatgtatgtaggttaaagaaaaacagaagaacacaaaacaaaaaaatatccgaacgatagtcgatgaagaatgcgatgcgcttaacttaagtccgcatgcatgtaagtacgcttgatcattcagctatcgttcggataattgttttgtttgacggattcatttgtttttcagagcgcctgtcagtcaacatttgaataaagtgaaactgtatctttttcatttggattggagacgtacttttttgattttagcataaccccgaaaaatattgcggatcactaacaagagaccgatcagcaacggaatagctaataagtagagggaatagccatggacctgctctaccgcagcagcattggttttatttacttctgtcagcgcctgttggatcacttggaaactgaatacactcataaatccagcaatgataaagagtacaaaccctaaataaggaatatgagaagaacggcgaaaaagcgcaaagccgatatagagcaataaaagaaaaaatggcacaccaaaagcaaaataaggattcaacatgtttttttacctccttttatttatcatactccaaaatttacgttttgggaattacagtgtaagattaaaaggaaatagatttttaggaggatgttatgtcagcttatcttatgccaatcaaggttgcattactgttatttccattcttggcacttgcaatctcgtcgatattttttgtgcgccaataccgtaaatttggccgatttattttttcacgagcaattgtactttattcatttgttttttatctgctttgtgcctatttcttggtcattttgccgttgccgagtattgaagaagtcgctcaaatgaccggtcccaaaatggagtggcagttaggtgcttcctggcagcattttttgcagcaaacggtgttacaaatcaatgatcccactacgtatcttccggctttgaagcaaaacgtagtcttagagccattattcaatctttttttgacactgccttttggtgtctatatgcgctactactttaaattgtcttttccgaagacgattgtggcaacctttggcttatcactgttctttgaattgactcagttaactggattatactttatttatccgcgcccttatcggttgtttgacgtcaatgatttatttgtcaatacccttggcgggaccattggctttttggtgacgccattgttcaccttcctgttgcctacccgtgaagagatggatgccgaatcttatgccaaagataatcgagtgacgtttactcgccgatttgttgcttggctgatcgattggggaatattgaatttattcgcttggatgcttatgattctgttaagagtgactgtgaataaagaaatcgatgactttacgaatgattattggtattttttactagaagtagttctttactttattcttttgaattatattctcaatggacaaacgctaggaaaaaaacttgttcgcattcgagtgatggaggaaaatcattcccgtgtcagtttcagagcaatttttaagcgttatggattgctctatctgatctatgttagtgcgacacgcatcaatgtgttgtttacgccttttattcaatctactaatcaaatgctcgtcctagtgagtttgttggttgtgttgatttttggtttgatccaacttggattttattgcaacatcctttgggcagcattcaaaaaacaaccgcgattcttttacgaaaaaagaacggctacttatgtagtaagcacgatccagcgaaacaaggttaggaattgagctggaaatatgctataatccaaaagatgtcaatagaaagaaggtgtttgaatgtcttttgagtcatttaaatttcaaccatttatttacgaagcgttagcggagaagaaatttacttcaccaacagaagttcaagaaaaattaatccctgtgatccaaaaaggtcgcagtgtcgtgggacaatcccaaactggaagtgggaagacgcatacatttttgcttcctttgatggatcaaatcgatccgcaaaaagatgaagtgcaagtcgtgatcactgcaccgagtcgtgaattagccacgcagatttatcaagcggcaaaacaactagcagaatttcagcaaccagagattcgtgtgaccaactttgtaggcggcacggataaacaacgacaaatggaccgcttgcaaaaccagcagccgcagcttgttatcgggacaccgggacgaattctagatatgatcaatgaacaagcactggctgtgcatacggcacgagcctttgtcattgatgaagcagatatgacattagatatgggctttttggaagaagtggaccaaattgctagtcgattgccggaaaaactgcaaatgttagttttctctgcaacgattccagaaaagctgcgtccatttttgaaaaaatatctcgaaaatccattgatcgaagaaattcgtccgaaagcagtcatctctgaatccattgaaaattggttgatctcaactaaaggaaaagataagaatcaattggtttatcaactactaacgacgggacatccttatttggcgattgtttttgccaataccaaatcccgagtggatgaattaaccgactatctgaaagaaaaagggctgaaagtagccaagatccatggcgatatcacaccgcgagaacgcaaacgtgtgatgcgtcaggttcaaaatttagagtatcaatatgtagtcgcaactgatttagctgctcgcgggattgacatcgagggagtttcgcatgtaatcaatgctgagattccggcggatttggatttctttattcatcgtgtgggacgtactggacgtaatcagttagctggaacagcgatcactttgtatgatcctagtgacgaacaagccattcaagcaatcgaagatttaggtgtaaaattccaaccaaaagaaatcaaaaatggggagatcgttgcaacatatgatcggaatcgtcgacaaaaacgtgaaaaatcaagagacgaattagacccaacattgattgggttggtcaagaagaaaaagaaaaaaatcaagcctggctacaagaagaaaattcaatgggctgttgataagaaaaacaaagagaaacgaaagatcgaacgtcgtcagtcgaatcgctctgctcgcaagaataaaaaaaattccagtatctaatttaaggaacacccatcggccaggcaatggctattgggtgttccttcgttttagcaaagatttttttccatttttacacagaggattccatcttcttcaaaaggaggagagaggatctcatagccgcatttttgataaaagccgactgctgcaatttcagaagacaaaaccgaccagcaaaagccattggtgatcgctttttgctcataggccgctaacaactgccgtcctatcccttgctttcgatagtttttagccacgcaaaagcgatcgggctggatcgtttgcgaatccaacgattgatagcgaatagtggcaattggtacttggccttctgccagtagaaaataatggcagaactgatctttttgatcaaattctaattcaggagcgattccttgttcgtcgacaaagacagatcttctaagtgcaaaaacagcctgctgaatccagtcctcccgcccaaaataaagctgcatcatttttcctcccaattcatggtatactcaatctatattgattgtagcagatgaaaggggaaagctcgtggattttttcgaagcattgcaatggacgaattggaaaaatttgactgctgaagtcaaaagccaagtgtttcagcaagtagtcatgtactttgtcagcccattgaaagaaattacagatgttcattttattaaaacaagctatgcaggaatcaagtgtgagacctttgaattaacgattgatgaggaacccttcgtctttgtgcctggaaattatgaaacaattctaggctgggacttgggcattcagggattgccgataacctgctggtctaaaatgtggcaagaacctctcagcccttcgctccgtcgcttgatcaaaggctacggattgtcaaacgctgaggagtggggagattttgtaaatgaatcaatgagcccattacgcaaagcgaccatcccacccatgttggtgcagaaaatggcattgccagcaggtactcgtttgattggagaactagatacagtcacgggagaattccatggtcatgttgatcaatttgaaacttttggttccgagatacggcaggcatttcagcagccgcgaagttttgaagaaagtttgcagtgggaaatgccaagaacaatcagtgccgaaaatcagtactttgcggaactgtatccagtgtctggcaattatcatgtatacacccaccaacgaatgacccaaaatgaattgcagcactggctgggacagcagggatatgatttgatgaatgaagaacagtgggaatatgtagtgggcgccgggacccgtcgtttatttcgttggggcaatgaaaaaccctgtgaggatggtgtcaaattgaccaaaaaagcattggctgagccgaacatgtttggcttgatttatccgtatgccaatggatgggagttaactgacagttcatttctaaagatggaagattggccagagtgcggcaatccattactggatacattgccctatgctagttattatcggtcacgcaaaatgttgcaagcaaaccagcagttggaccctgaaaaataccgctaccgaaaagcagttattattgatcgagaacggatttgaggattgactttttgtgaacatttccttatacttttaaagacgaaggacatggttgatttgttcattctttacagaaagtttttcaaagctgagagaaaaacaagaatcctaattgatcgctccctttggtatctgattcagtagaaatgctgacgcctgctctgcgttatcgagtctgagaggtaatgatcaacatcattgcaagtaaggtggtaccgcgtagctacgtccttgctctgcagtggtgtttttttgtttgactacccagaagcgagttcgtcgaatgaacagatatcagagagaaaggtcaccaaagaacaaaagcattccttgctcccaagcgattttatcattagaaagtaggaaaactatatgaaacacttatcaagtgccgaagttcgtcaaatgtttctcgatttctttcaatcaaaaggacattcgatcgagcctagtgcatcactcgtccctgtaaatgacccaacattgttgtggatcaactcaggtgtagcaacattgaaaaaatattttgacggtaccgttgttccagaaaatccgcgaatcaccaatgcacaaaaatcgattcggaccaacgatatcgaaaatgttggtaagacagcacgtcaccacaccatgtttgaaatgttaggaaatttttcgattggtgattacttcaaaaatgaagcaatccattgggcgtgggagtttttgacttctccagaatggatggcctttgatccagaaaagctttatgtcacagtgtatccaaaagacacagaagcaaaacgaatttggcgcgaagaaatcgggttgactccagaacacatcgtagagatcgaagacaacttctgggatatcggtgctggaccttgtggaccagattcagagattttttatgaccgcggacctgagttcaacgatgtcgcagaagatgatccggagaattatcctggcggtgaaaatgaacgctatttggaaatttggaatttggtcttttcagagttcaatcatcaagcagatggcacgtatgaaccattaccacataaaaacattgatacggggatggggcttgaacggatggtgtcgatcatccaaaatgcaccaaccaactttgaaacagatctctttatgccgatcatcgaagcggttcaagaattgagcggcaattttgcatatggtgaaagcaaagcaacagatatttccttcaaagtgatcgccgaccacattcgcgcgctttcttttgctataggcgatggtgcactaccgtcaaacgaaggacgcggatacgtgttgcgccgtttgctacgccgcgccgtcatgcatggcaagaaattaggtatcgattcagcctttttatataaacttgttccgatcgtaggaaaaatcatggagagttattatccggaagtattggctcaacaagcgtttatcgaaaaagtaatccgtaatgaagaagaacggttccatgaaaccatcaatgaaggattagagatcttgaaccaagtcattgctaaagtgaaggcagatgggcaagagacattagcaggtgccgatatctttaagttgtatgatacttacggattccctgttgaattgactgaagaagtcgctcaagatgaagggttgaaagttgatcatgccggttttgaaaaagaaatggatgcacagcgggcacgggctcgttctgctcgatcgactgagctttctatgggtgttcaatccgctcttttgactgatatcaaagtcgaaagccgttttgttggctacgaaagccttgaagccaacagcgaattgttagtgatcattcaagaggaacaattgcttgatacagtaaccactggtgaagccaaactgatcttcaaagaaacaccattctatgcagaaatgggtggtcaagtagcggacactggtactgttgttgaccaatctggtgttatcgttgctgagatcactgatgtaaaaaaagcaccaaatggccagtttttgcatactgcgaaggtaactggcaacttgacggaaggggcttcttatttcttgcaagttgatcagcaccgtcggaacaaaatcatcaaaaaccacacagccactcatttattgcacaaagcgttgaaagaagtgctaggtagccatgcaaatcaagcaggttcattagttgcacctggacacttgcgttttgactttagtcattttggccaagtgactgcagacgaattaagtcagatggaacaaatcgtcaatcagaaaatttgggaagctttgccagtcgtaactatcgaaaccgacatcgatacggcgaagggcatgggggcgatggctctctttggcgaaaaatacggccaggatgtgcgtgtagtcaatgtcgcagattggtctatcgagctttgcggtggcacacatgtcgccaatacagaagatatcggtattttcaaaattgtttctgaatccgggattggtgctggcgttcgtcggattgaagcagtgacgagtcaagaagcttacgcattgctgcatgaaggagaagcacagctaaaagccattgcagggatcgtcaaatcggcacaaatcaaagatgtagtcagcaaaacagaacaattacagcaacaactgcgggatctgcaaaaagaaaatcaagcactggcgagcaaactagccaatcaacaagctggcgatgttttcaaagatgtcaaagaagtgaatgggattcgttttattgctgcaaaagtaactgtcaaagatatgaatcagttacgccaattggcagaccaatggaaacaaaaagaattatcggatgttttagttcttgctacagccaacgatggcaaagttaatctgttggctgcaatgacgccacaggcaaatgagaaaggcttgaaagctggagatttgatcaagcacatcgcaccgaaagtcggcggcggtggcggcggacgtccagatatggcacaagccggtgggaagcaaccagaaggaatcgacgctgcattgactgaagtagccaattggttagccgcaaactgattctttaacagcaaatcataaaaaaatgtataacatcaagaaatatccgaactggaattgtgtgtcagagagctgccgcgtctttttataagacgttcggtagaggatcgaaacgcgattccttcgggtattttttctgtttttgcagaaattggattttattaaagagaaattttggaatagctgaagcattcatttttagaaaaatacgttttttacatgcttttagttgttttactgatttcattcggggtaaaataagaaagacgaatttacgcttggagggaatgttatgctgcgcttctttttaaagcgaatgaaaggaaacgcaactgatcgcaccatgatcggtaaacttgcgggctatctgggattgctctcaaatgcacttctttttgtcgcaaagtttctgattggactgtcggcacaatcggtctcgatcatggcagatgctatcaatagtctgtctgacaccgcctcctcctttttgacattgatcggttttcggattgctgccaagccggcggatagggagcatccctacggccatgaacggtttgaatacattagcggttttgtggtttctttactgatcacatttgttggttttcagtttctaaaaaatgcctttgaaaaaatcattgctcctgaaccgatccgtttatcaccatggttgtttattgtgctgatcttgtcaataggattaaagctttggcaaggtctcatgtaccgtcaattggcgaagaaaattgactctgcaaccttacaagctagcggacaagatagttttaatgatgtactcacaacagttgcggtcttgctctctgcattgattgaatggggaaccggttggcgggtggatgggtatattggcttgctgatcgcgctatacattttatttagtggtatcatgatgatccgtacctttatcaatgaactgctaggtgcacgtccgacagaagctgaaatccgtgagatggaggatcgactagatcgttatccaacaatattggggtaccatgatctgctcgttcataactatggtcccaagaatcgttttgctagtgttcatattgaagtcaatgaaagctggagtttgtcacaagcccatgaagtaattgatgcgatcgaacatgattttcaaaggaaccttcaagttgaattggtttgtcatcttgatcctgtccctatccaaaataaacagtaccggcagttgcgggaaaaagtcagacaaatcgttgagacgattgatccagagttaaggatgcacgactttcggattcacgaaaaacagtttgcttttgatttggtgatcccaaagcaaagaaattacacagatcgtgaactgcaagataaaatttatcaaaagattacgcatgaaatcggcacgtatgaggtggcgatcacgtttgatcatacttatttgttgtaggaggaaaatatgataaaaatggatatgagtgtggtttcgaccgtctttttggcgttgctgtttgtcaatacagttgcggcatttattactgtctttcgtaaaccgcgatcaattgcaagtgtttttgcctggatgatgacattagtctttatcccgggttttgggtttttgttgtatttgttttgtggtcgaggaatcgacggagaaatcatttataaattcagtgagcaccatcaaagcaggatcaatgaattaaatcaaatcatcaaagtccacaattatttctttccagagcatccatactcagatgacaaccatctattggaacggtattttaaaaatttagatgaatcccctttgacaaaaggcaatcaggtacaattttatacggacggcaaggaaaaatttgctgccttattttcagatatgcaaaatgctgaagacaatattcatgtggaatactattctttttttaatgatgaaattggtgggcagtttcttgatgtcctaattgaaaaagccaagcaaggagtagaagttcgactaatattcgatccatggggttctcccaaagcaaatcgtaaattctttcagccattaatggacgctggcggaaaggtcgtgccctttattacttcaaaaaatttgattcgcaatacacgtttgaattaccatttgcatcgcaaaatcgtggtgattgatggccaaattggctggaccggcgggtttaatgtaggggatcaatatttaggtaaaaaagcaaaatttggttattggcgggatacacatgcgcgaatcgttggaactgctagttttaccttacaggaaatctttatccgcgattggaatgcctcgattagaaatgaagcagatcaactggaatatgaagatcgctatttcattttaccgcctaaagaagaggcaggtcatgtcgatatgcaaatcgtggccgacggacctgagacggaaacgcagattcttaaaggcggcttcgtcaagatgattttggcggctgaaaaatcgatttggatccaaaccccttatctgattcctgacgacagtatgatgaatgccttggagatcgccatccactcaggtgtagatgttcgaatcatgattccctgcatgccggatcatccatttatctatcgagcgacccaacactatgccaactatttacatcgccggggagcgaaaatctatatctatgagaatggatttttacatgccaaaactgttatgatggatgataccatctgctcgtttggaacgacaaatcaggacattcgcagttatgcgttgaattttgaagtcaatgcattcgtttatgatcaagaagtcacggcgcaattaaaaacgatttttgaagaggatatgctgcagtccactttattgacagatgaaatgctggctaaacaatcttactggttgcgtttcaagcaaaacttttctcgtttgttatcgccgatcttgtaattttaaagccttagctaacccttgacgggccagatggtcggcacctttgttttgagattcgggaatccattggacaattagtaaagtgaaatagggcagcaactcttggatttcctctaaatacttccgaaaatcggggttgttcgtatcatttttgtcgattgtttgagcgacgactttactgtctgtataaagcatgatcgtctggtcttgccattctttcgttaagagaaattcaagagcatgatgcatcgcagcaaattctgcttggtgatttgtgagcgtgggtagtacaaaggcatgctgttcatgcaggtcttcccctacaatcaacagaccgccgccactaggtccagggtttcctttggttgaagcatcgagatacacttttagcatgagttgactccttctgttatgatggatataagtatactagaaattgatcgcgtgaggaaattatttatgaaacgtaactatttttggcaaccagaaccagccaccgcaattatctattggtccagttcactgatcgttttgttttacagcttgattttggcactggaaaatactcgcccttattggaaaagcaatcttgtgttggggatttttctatttcttgtctggttaggattgcagcgccgcctttatttgacggagaagaccatcaaaatcacctatgcccgcttttggaaacgagtagttattcctctcgagaaaatccaagccattgggatagagaatcatcatttgagaatcgtgaccaatgaaagaagctatacgtttgtaatgcgtaaaaaagatcttgaagtattacagacacactttgttaatctagtgcctattcttgaaagacaagagtcagaaaaataattctggctctttttttattccagtgaaaaacagggtttcaatcttcatgaaaaacggtataatagaaataggacaaacaaatatgaaagaataagggataatagttcgggaatagagggttactgatgaaaaaagatatcgaaattgcacaagaagcaacaattaaaccgattattgacattgcagcaactatcggattacaagcagaagatctagaacaatatgggaagtataaagcaaaaatcgattggccagcaatcaaggaaatcgcgaaacgtcccaccggcaagttgatcttagttacagcgattaacccaacccctgcgggagaaggaaagtcgacagtcacgattggattggcagatggcttaaaccgtattggaaaacaaaccgtgattgctttacgagaaccatcattaggtccagtcatggggatcaagggtggtgcgactggcggaggcagagcgcaagtcttgccgatggaggacatcaatcttcattttaccggggacatgcacgcaatcactgctgcgaataatgcattatctgcgttggtggacaatcatatccaacaaggaaatgaattagggatcgacccgcgacggatcatttggaaacgtgtcgtggatttgaatgatcgcgcattaagacaagtgatcgtcggactgggcggaccactgcaaggagtacctagagaagatggctttgatatcaccgttgctagtgagattatggctattttgtgtctagcaacgaatttggataatttgaaagagcgattgagcaatattttgattggttatacgtatgataaacaacctatctacgtcaaggatttgcaggttcagggggcattagctttattgttgaaagatgccttgaaaccaaatttggttcaaaccatcgaaggaacgcctgcgttgattcatgggggaccttttgccaacatcgcccatggctgtaatagtgtcattgcaactgaaacagctctccatttaggagaatacacggttactgaagcggggttcggcgcagatctcggggcagagaagtttttggatattaaaacacccaatctctctaaagcaccagacgctgtcgtagtggtcgcaacgattcgcgccttaaaaatgcacggcgggatagataaagaacatttaaaagaagaaaatgtagcggctttagtcgcaggttttgccaacttgaaacgtcacgtgagaaacatgcaaaattatcaattgccagttgttgttgcaatcaatgaatttgtcactgataccgaagctgagatccaaatgttggagcaatgctgcaaggaaattggtgtaccaatcgctcggacgcaagtttgggagaaaggtggcgcagggggggaacttttggcgcagcaagtcgtcactgccattgatgaacaacccggcaattatcgtaggctttaccaaaatgaagagagccttcctgataaggctgccaagatcgtcaaagagatttatggcggatcaaatgtggtcttctcaagtgtggcacagcgccaattgaacgtcttcaaaaaaaatggctgggatcaattgccgatttgtatggcaaaaacacagtactcttttagtgatgatccgcagcttttaggcgcaccggctgatttttcgattacgatccgtgaatttgtaccaaaactaggcgctggttttattgttgccttgaccggtactgttatgacaatgcctggactgcctaagaaaccagcagcattgaatatggatgtcgatgcagacggcaatgtatctggccttttttaatcttattttctctccgcatctgcgaatactggatgaagaaataggttctcgaaggctccagtaatagttcagtcaatttcttataacgcaccacacttacaggtcactattgattctgtaagtgtggtgtgttgtttgcgagcgattcgtcgtctttcagtaggttttgtttggttcgttttttgttgacgctgtacataggctgcgagattcggaagagaataaaacctccctttttcttctgactttcaaaaattggaagaaataattgaagaggctgcgaggatatttgattttttgcgaagttttctaaaagtctcccatagttatctccagcattcctatttatccgtcgctcttagaaacattagaaacgaaagtaggaaacgggaaggggaaagtgttatcaagctcttttaaacgagagactataaaaagaatggttttaaaaagagggctataaaagtcgctcgtttttatcttatgatttgccgtttttgggttttcaatctattaaaagactgaaagttaaatattagcaagaggcaagagacgtgtcttttgttataatataatcagtagtgcatttaaaagactgttttctttctaagaaaattaaagtatactgataaaattggagcgtataaaacgatgaaacgtaaaatcatacgaaataccggcttttatgcaatggggagtccgctggatttgctagtggatggtcagaaagtcgccagaatcaatcatcaagaaaccgtcgagctgaatctcaattctgacaaccgattgtctgtccgattttccatcctaaaaagcaaagaaattgcgttgcctgatttacacgcagaaactccattagaaataaaaatgaatccgcgactgatttctttttatgtgctgttttatattggtctgtttctaatgatcgcgtttttaactcgcagtggacagttgtccattatcctttcgggtatctttctttatttagcaggttatctatgtttaggtctttattatagcaaacaagcgtatgtaattgaggaggcaacaaatggctagcggagcagatatttttttgagtagtttcaatcgaatcgaaaaacaattgagagacgatttgggtaatcctcgtaacatgggtttttcagagatggttcgccgtctttcaaaacagaagcaaggagacatcaaaaaatacgaagaagatttattgcagatggcccaattgcggaacgccatcgttcatgaaaaaatcggtgaaaattttgtgatcgccgagccaaatcaatgggtagtgacacgaatccaacaaatcgaacaggccttgttgcagcctgaaacggtcttacctaagtttggtaaaaaagtgaccggttttgaaaaaacgttggcgctgaaagaaatcttgaagatcgtcgctcaaaagcggttttcacaatttccactctatgacaaaggacgttttgttgggttgatcactttacgtatgttaggatactggtttgctcaagaaagtctaaaaggagagatccgattagaagggcgtaaagcagaagacttgttgatcaaagacggtaaagagtccaattatcagtttgtacccgcaacaacaacggtcactgaagtagaagacctgttccataaaaatgctttacttgaagcggtattaatcacaaaaaatggcgatcctaatggaaatttattaggcatcgttcgtccgcgggatatttttaacgaagaaagtgtggaaaaaaaatgatagctttgttttttttactaagtgccataattgttggacttgatcagtggttgaagttttggatcgtcagcaattttgaattaggtgatgttcaaacgttgatcgaccatgtcttttcactaacttatattcggaataccggtgccgcatggagtatcttagaagggaagatgaccttctttacgatcatcacggttgctgctgttattgttgtaacttatttattgatccgtcatcgtaaaagcagtatatggtttcgattgggactatcctttatcttagccggagcgatcggaaattttatcgatcgcttgcgtttggggtacgtcgtggatatgtttcagctagattttatcaattttccgatttttaatattgcagacatgtcgttagtgatcggcgtgttattgatttttatctatgcgttagttgatgatgaagtgaagggaaaataaatgaataatcaaattgaagtagtaatccatgaagaaaaagggcgtgtcgataaagtattggcagatcgtctagaagcgagccgttcgcaaattcaacaatggttgaaagaaggtgcggtcacctgtcaaggggatccaattcgtgcaaattacaaagtaaaagctggtgaccagttagtgattcaagtaccagaaccagagtccctagatctggaacctgaagatattcctttgacgattgtgtatcaagaccaagatgttgccgtgatcaataaaccgcaaggaatggtcgttcatccttcggcagggcatcctaacggaacgctggtcaatgcattgttgtatcatatgatcgatttatcttcgatcaatgatgttgtacgaccaggaattgttcatcgtatcgacaaggatacgtcagggctattgatgattgccaaaaatgatcatgcccatgaagcgttagccaaacagttgaaagacaaaacttctttacggaagtatgttgcgctggtccatgggaatatttctcacgaaaaaggcacgatcaatgcaccgattggccgttctaaagtgaatcgcaagatgcaagcagtgcaagaagatggtaagccggctgtgacacattttacagttttggaacgttttgatcaatttactttagtcgaattacagttggaaacgggtcggacccatcaaattcgggtccacatgcaatacattggctttccattagccggcgatcctgtatatggccctaaaaagactttgaaaggcaatggccaattccttcacgccaaactgttaggatttacccatccgacaactggagaatcaatggtttttgaagcgccattacccgaactttttgaggaaaccttaaaaaaattgcgaaaaaatgattgatttttttttcaaagaactgtatagtgtgtgtaacaaataaatagctcctttaagtgtagtcccgtgaggctaagaaggaaatgagcaagcagacgactcccgcgttggagcatcgaaaacttgctggatgattgcgcatattctggatcgctgtatacagcgccagaaagtatgatcggaaaacataactcctgcctcactaggcaggagtttttttatgttcaaaattaggagggaacgaaatgccaaccaaagaagtagtagatgcagtaacaatgaaacgagcattgaccagaatcacttatgaaatcatcgaacgcaaccgagggattgatgacctagtcttagtaggaatcaagactaggggaatctatatcgcacaacgaattgctgaacgcttgaaacaattggaaggggtagaagtccccgttggcgaactggatatcacattgtatcgagacgataaaaaatcagatgaagatcctgagatccattcttctgacattccaacagcaatcgatggcaaagaagtcatcttgatcgatgatgtgttgtttacagggcgcaccatccgggcagcattagatgccatcatggatttcggtcgtcctcgccggatttcactagccgtactagtcgatcgggggcatcgagaattaccgattcgggcagattttgtagggaaaaatattccaacggcattaagcgaacaaatcattgttgaaatggaagaatctgacggttctgatcgaatcatgatcaataaagaaaacgagtaggaagaagagtgacagacacatggaaaagcaagaatttcgcaataccgatgtggtattagatatcaatgatcgcccaaaggcattgccttggttaggcttaagtcttcaacatttattcacgatgttcggagcaactgttttagtaccgatcctagttgggatcaacccaagtatcgctttagtaagttccggtttggggacacttgtttacctcgttacgacgaaaggaaagattcccgcatacttagggagcagctttgcttttatcgctgcaatgcaaatgttgatgaaatcagacggctacccggcaatcgcccaaggagctgttacaacaggactggtttacatcatcgtttctctgatcatcaaaaagattggtgctgcatggctggataaaattttgccgccgatcgtcgtagggcctgtgatcatggttatcgggttaggactagctgctaatgccgctcaaaacgcaatgtacaatggggacatctatgattttaaatttatcttagttgcattggttacattgggattgacgattttcttcaacatgtttttgcgagggtttcttggcttgatccccatcttactagggatcattggtggttacttagtagctttagctgctgggatcgtagatgtgcagccaatcattgatgctgcttggttctcattaccaagcttcgaaattccctttgttcaatacaagccaacgctacatttgaatgcgatcacgacgatggcgcctatcgcttttgtcacgatgacagaacatattggccatttgatggttttgaataaactaacaaagcgtaacttttttgaagaaccaggattaaacaaaacattgatgggagacggctttgcgcaaatcgttgccggattcgttggaggaccccctgtgacaagttatggtgaaaacattggtgtcttggccattacgagagtgcacagtgtctttgttatcggtggtgcggctgtcttggctgtcttgttaggctttgtcggaaaattgagtgccttgatcttgagtatcccaaatccggtcatttctggaatcagcttcctattgttcggtgtcattgctgcaagcgggatgaaaatcttgatcgacaataaaatcaattttgaccgcaaaaagaatttgatcattgcttctgtgattctggtgatcggaatcggcggccttgtctttacggtcggaacattcaccttatcagccatggcattagcaactgtcttaggaatcattttaaatctaattttgccagaaacatcacgcagtgaagaacaataactagtcgtcaactaaaagggaaaaactaggaggtattattcatgatcatccaatcagaaagaatcagtttaaagcatcttttgaccgttgaagcattaacagatcgagaagtgatggggcttatccgcagagggcaggaatttaaaagaggggccaaatggatgccgcaaaaagaacaatactttgctacgaaccttttctttgaaaatagtaccagaacccacaaaagttttgatgtagccgaaaagaaattaggtcttgaagtgattgaatttgactcctcaacgagttctgtgcaaaagggcgaaaccctttatgataccgtgctgacaatgtcagcccttggcgtggatgtcgctgtgatccgccacggggatgaaaattattatgacgagctgatccaaagtaaaacgatccaatgcagcatcatcaatggaggcgatggcagcggacagcatcccacgcaatgcttattagacttgatgacgatctatgaagaatttggccactttgatcaactgaaagtagcgatcgtcggagacatcacccattcccgtgtcgccaaatcaaatatgcaaatgctcaaacgattaggcgccaaagtgtatttttctggcccgccacaatggtatgacaatgaatttgaagtgtatggacactggttgcctctagatgaattagtgaatcaagtcgatgtgatgatgatgcttcgggtccaacacgaacgccatgatggctcagaaagtttctcaaaagaggcttacttacgggattatggattgacagtggaacgtgcagcaaaaatgcaagaccatgccatcatcatgcatccagctccagtcaatcgtgatgttgagctggcagatccattagttgaagggctgcgttcaagaattgtcacgcaaatgacgaatggcgtgtttgtccggatggcaattttagaagcggtattgaatggcaaagcttaattataagaaacgcgaccaatagagatagaggaggaagcaacatgaaaacactcattaagaacggtaagatcatcgctgacggtgatcattgtatccctgcagaaatttggatcgaagatggtatcatccaagcgatcggaacgactttttcagaaacagggttcgatcaagtgatcgatgcaaagcaacaactgatcactccaggattagtggatgttcatgttcacttcagagagccaggatttgaatacaaagaaacgatcaaaacaggaagtatggcagccgctcgtggcggtttcactacggtttgtgccatgccaaatttaaatcctgtgccagataccgcagaaaaattgcaacaagtctaccagcgtatccaagaagacgccgtggttcatgttttgcagtatgcaccgatcacagaagaattacgtagtgaagttttaacggatcaaaaagcattgaaagaagccggcgcttttgcattcaccaatgatggcgttggcgtccaaactgctggtacgatgtacttggcgatgaaagaagcggccaaaaaccaaatggcattagtggcgcatacagaagatgactctctgttatttggcggtgtgatgcatgcgggtaagagagcagcagaattaggcttgccggggattcttagtgccacagaagcatcacaaattgcccgggatgtactgctggcagaagaaaccggggcccattaccatgtctgccatgtttcgacaaaagaaagtgtgcgggtcatacgtgaagccaaacaagcaggaatccatgtgacggcagaagtttccccccatcacttgcttttgatcgatgaagatatccctggcgatgaaggattttggaaaatgaatccgccgcttagaggtagagcagatcgcgaggcattgatcgaaggattactggatgggacgatcgattgtatcgcaacagaccacgcgccacatggctatgacgaaaaaatgcaaagttttttaaaagcaccatttggaatcgtcggttcagaatatgcttttcaattgatttatacgcattttgtcaaaacgggccgctttacactccaacaagcggtggcttggatgaccgagaagcctgctgaaatctttggattgaaagctggcagattaatggtgggagctccggcagatctcgcgatttttgatctagagacatcttatactgtcgattcggatcaattcctttcaaaaggaaaaaacacaccatttaataactggccattatatggggataccacccatacattggtcaatggaaaattagtttggcaaaaaggtagggggattttatgaaacgctggttgattttggaagatggcacattatttgaaggtgagggatttggcgcagagatcaatgtctatggcgagattgtctttaccactagtatgacagggtatcaagaaaccattacggatcaaagtttcaacggtcagatcatcacctttacctacccaatggtgggaaattacggtgttaatcgcgatgactatgaatcaatcgctcccacttgtaaaggtgttgtagtgaaagaacatgctcgtgtagccagcaactggcggaaacaattgaccttagacgaatttctaaagcgcaaaaacattccgggaatcgcaggaatcgatactcgggctttgactcgtaaaatccgccaatttggaacgatgaaagctagtattgtggatgccaatgatgaatttgctcatgcctttgatcaattgaaagcagccgttttgcccaccaatcaagtggcacaagtttcaacttcaaagccttatccaagtccaggaacaggacggaatatcgtcgtgatcgattttggcttgaaacacagcattctaagagaactttctcaacgaaattgtaatctgacgattttaccctacaataccaccgcacaggaaattttggatctcgcgccagatggtgtcatgctgaccaacggacctggtgatccgaaaagcctccctgaagccatcaaaatgattcaagaaatccaaggaaaagtaccgattttcggtatctgtttaggacatcagttgtttgctttagctaatggcgctgatacttacaaaatgaaattcggtcaccgaggattgaaccatcccgttcgagaaatcgctacaggaagaattgatttcacctcacaaaatcacggttttgcagtagcagaagcatcgattgatcaagagaaactgatcatcactcatgtggaagtcaatgatggaaccattgaaggtgtccgtcatcgtcgctacccagcatttagtgttcagtatcatccagatgctgcaccgggacctcatgatggcgtacatttgtttgatgaatttttagaaatgatcgatgcatggaaggagcagaactaaatgccaaaacgtacagatattaagaaaatcatggttatcggttctggaccgatcattattggccaagcagccgaatttgactatgcaggaacgcaagcctgcttagcgttgcgagaagaaggctatgaagttgtgctggtcaactcgaaccctgcaacgatcatgactgataaagaaattgccgacaaagtctatattgagccaatcactttcgaatttgtctcccggattttaaggaaagaacgtccggatgcgatcttgccaacattaggcggtcaaaccggcttgaatatggcaatggaattagccaattccggcatcttggatgagttggaaatcgagttgttaggaaccaaattagctgcgattgatcaagcagaagaccgtgatctattcaagcaattaatggaagagttaaatcaaccgattcctgaatcggagatcgtttcaacagtggaagaagcagttacttttgcaactaagattgggtatccaatcatcgttcgtccagcctttacccttggcggtactggaggcggtatgtgtaataatgaagaggaattgcgagtgattgctgagaatggtctaaaactgtcaccagtgacgcaatgtctgatcgaacgcagtattgccggctataaggaaatcgaatatgaagtcatgcgggattcagccgataatgcgatcgttgtctgcaacatggaaaactttgatcctgtcgggatccatacaggtgattcgatcgtttttgcaccgagtcaaacactctccgatcatgagtaccaaatgttgcgtgatgcttctctaaaaatcattcgcgcattgaaaatcgagggcggttgtaatgttcaattagcgcttgatccccacagctttaattactatgtgatcgaagtcaatccccgggtttcccgttcgtctgctttagcaagtaaagcaactggctatccgattgcgaagctagcagcaaagattgctgttgggttgacattagatgaaatgaaaaaccctgtcacagaaacaacttatgccgagtttgaaccggcattggattacgtggtagccaaaatccctcgttggccctttgacaaatttgagtccggcgaacgccgtttaggtacacagatgaaagcaaccggtgaagtgatggctatcggtcggaatatcgaggaatctttgctgaaggctgtgcgttcattggagatcggcacacatcatattgaaatgaaagaattagaacagctttcagacaatgacttgatcgataaggtgatcaaagcgcaagatgatcgcttattttatgtcatggaagccattcgccgcggctatgctattgaagaattgaatgaaatgactaaaatcgatcttttcttcttggataaaatgctgcacatttatgaaatcgaacaagaacttgctgccaacagccaagattttacaacattaaaacgagcgaagcaaaacggctttaccgataaaaaaattgctgagttatggcagatgacagaacaagagattcgagacatccgtaaggaaaatcagttgcttcccgtctacaaaatggtagacacttgtgctgccgagtttgagtcggcaacgccttacttttatagtacgtatgagtttgagaacgagagtgttcgcagtgaaaaagaatctgttttagtcttaggttctgggccgatccgcatcggtcaaggtgtggaattcgattatgcaacagtacactcggtcaaagcaattcaggctgcgggctatgaagccattattatgaacagcaatccggaaaccgtttcgacagacttctcgatttccgataaattgtattttgagccattgacactagaagacgtcttgcatgtgatcgaactggaacaaccaattggggtcattgttcaatttggcggtcaaacagcgatcaatttggcggagccattagttgccgcaggagtcagcatcttaggtacgagtatcgaagacctcgatcgtgctgaaaaccgtgatctctttgaacaagcgttacagacattagctattccacaacccccaggagatactgctacaaataccacggaagcagtggcgatcgctaatcgcatcggttatccggtccttgttcgtccgagttatgtcttaggtggtcgggcaatggaaatcgttgaaaaccaagcggatctggaagattatatgaagcatgcagtaaaagcttctcccgaacatcctgttttagtcgatcggtacttagtagggaaagaatgtgaagttgacgcaatttgtgatggcacgacggttctgattccggggatcatggaacatatcgaacgagcaggggtccactcaggtgactcgatggcagtctatccaccgcaaaacctttctgacgcaacgattgccaccatcgaagactatacgaaacggttagcattgggattgaattgtgttggaatgatgaatattcaatttgttatccacgaggaaaaagtttacgtcattgaagtcaatcctcgggccagccgaaccgttccatttttgagcaaggtcacagagattcctatggcacagatcgcgacaaaagcgattttaggagaaaaattggcggatctgggctaccgtgatggcctttatccaacaccaaacgaagttcatatcaaagcaccggtcttttctttcaccaagttacaaaaagtcgatacttacttaggtccggaaatgaaatcaaccggtgaagtcatgggttcagacaaaaacttagaaaaagctttatataaagcttttgaagcagctggtttgcatattccggaattcgggaaagttctttttaccgtagcggatgaaagcaaagcagaggccgccgtgttggctgcgcgctttttcgaaatcggcttctcgatcttagcgacaaaaggaacagccgattactttgaaggctatggcttgccagtcacccgggtagcgaaaatctcggaaacagaagatgaaactgtcgttgatctcatcagaaaaggcgtgacccaagtggtgatcaatacaatggacaaaaatcggcaaaaagccactgaagacggatttattattcgccgggaagcagtcgagcatggggtgccgctcttcacctcgttagacaccgctgatgccattcttcaagtaatggaatcaagaggtttttcaacgaaagcaatctagcagtcagaaaggaaaacagctcatgaaacaagaacgaatgaccattacaaaacagcgaatgctcgcaccgcgaatctacgagatgactctctctggtgctctcgttcaagaaatgaccacaccgggacaatttctgcatattcgagtgccggatgatgcctttctcttaagacgaccaatcagtattagctggatcgatcaagaaagccaaagttgtcgcatcatttatcggacagaaggggaggggaccaagcggtttgcccatctgcaaagcgggaatcaactggatgttttaggccctctagggaatggctttcatatcgaagatttacaaaaagatgagactgtttttatcgtaggtggtggtatcggagttccgccactctacgaactttccaaacaattagtcgcaaaaggtgtacgcacgattcattttttgggatttgctagttcggaagtcatgtattacgaaaaggcgtttcaagctctaggggatacacgaatcgcaacggatgatggcacctatggcgttcaagggaatgtcggtaatctattgttagcagccgatagcaaacctgcggctgtttttgcctgcggcaacaatgggttgttaaaaacggttgaacaacttttccaagactgtccgaatgtgcaactttcattggaatctcgcatggcttgcgggatcggtgcttgctatgcttgtgtttgtcataaagccgatgatccaacagggaccaaaagtgtcaaagtctgtgacgaaggccctgtttttcaagctggaaaggtggttatttaagtggttttagctgttgaattaccggggttgtctctcaaaaaccccataatgccggctagtggctgttttggttttggcgcagaatacaacaagtattatgatatcagtcagctcggtgccgtcatgatcaaagccacgaccccagaagcacgctttggcaatccaacaccgcgagtggctgaaacaccaagcggcatgttgaatgcgattggcttacaaaatcctggccttcgagtagtcatggaagacattttgccagagttagcgcaaaagcatccagatctgccgatcatcgcaaacgtggctggttccactcaagaagattatgtcactgtctgtcaaaaaatcagtcaagcgccgaatgtaaaagccattgaattaaatgtttcctgcccaaacgtcaaacatggtggtattacttttggtaccgatcctcaagtggtgaaagaactgacccaagcggtcaaagcagtttcgcaagtgccaatctatgtcaaactatcgccaaatgtcaccgatatcgtacccattgcaaaagcaatcgaggcggggggtgccgatggtttcacgatgatcaatacgttattgggtatgcgcattgatttgaagacacgacgtcctattttggccaaccagaccggggggctctcaggcccagccatcaagccagtcgcgattcgtttgatcaaacaagtggcacaagtttctttgttgccaatcattggcatgggcggtgtgatgacggttgatgatgtgttagaaatgtatttagctggagcgagtgcggtagcagttggtaccgcaaattttactgatccttatatttgtcccaagttgatcgaagaattgcctgtacgaatggcagaattaggtatcgactctttggcacagttgatcaaggaagtaagagaggggcattaagatgattgaacgaccaattattgctttggattttccaagcaaaaaagaaattgagctttttttagagaaatttcctaaaacagaaaaattattcgtcaaagtcggtatggaaatcttttatcaagaaggaccagaaatcgtcagctggttaaaagatttaggccatgatattttcttagacttaaaacttcacgacattcccaatactgttgagcgggccatgacacgtttggcaaatcttggggtcgcgatcaccaatgttcatgcggcgggtggtattgagatgatgatagcagcaaagcggggactgcaaaatggaaccaaggaaggccaaactgtgccgctattgattgctgtcacacagctgacttctactagcgaagaacaaatgcagcaagaacagctaatttctgtttctttagaagaaagcgtgcgtcattatgctcaatgtgcagaaaaagcaggattagctggcgtggtttgttccgcccaagaagctgctgccatcaaggtagctaccaatcctgaatttatgtgcttaaccccaggaattcgtccggctggtagtgatgccggagatcaaaaacgaatcgtcacaccagcaaaagcaagacaaattggttcttctgcgattgttgtcggtcgaccaatcacacaatctgcaacaccttttgatacttaccaggaaattaaacaagcatggaaggaagctattcaatgacagaaatcagtaaagcaattgccaaagaccttttaacgattgaagcagtatttttacgtccaaatgaaccctttacttgggcaagcggcatcaaaagcccgatttattgtgataatcgtatgacaatgagttaccctgctgtacgtaaagcgattgccagtggtttggctgcgcaaatcaaagaacactttccagacgtcgaagtaattgcgggtacagctactgctgggatccctcatgccgcttgggtagcagatattcttgatttgccaatggtctatatccgcagcaaagccaaagatcatggcaaaggaaaccaaatcgaaggacgtatcacggaaggtcagaaaatggttgtgatcgaagatttgatctctactggcggcagtgtgttagaagcttgcgaagcagccgctcgcgaaggggcaaatgttctgggggtggcagcgatctttacctatgaattgccgcagggattaaccaactttgaaaaggcccagctgccattagtgacgttgaccaactattcaacaatgatcgatactgcattagagatggactatatcggaaaagaagatattgcattgctgcagcaatggaaacagtcacctcaaacttggactggtaaataagaacaacgaatatgcctggagtgatccaagagcatattcgttttatttttatcttttttctgatacgatttgagacgattcatcaaaagttatctggcagttgaaaggcagccagtttcaatagggaggcagttttattgaaaagaaatatggatgttccatggagttattctggggagaatggtcctgagtattggcacacattgtgtgactggtatgctgaaggagcgaagtttccattgcaatcgcccattgcgctttaccatgacgatacagaggaacctgtcgatgaggatttaagcttccattaccatcgggaacgctttactgaaaaagaatttaaaaatacgattcattttgttccatataataaagaaagttacgtgacctttcaaggcatcaattactacctaacggatattcattttcatatgccttctgagcatatcatcgatgatgagcagcaagaacttgaatttcatttggtacatatgaatgaacaaggagaaaacttagtcgtcggtattttgttccggttaacagataaattaaactggatctgtaatcagcaagatgatagtatttgggatttcaaaaaccatacccaatggtttgacccatcgatgtttttaccggaaatgacccaccattttcactatgtaggttctttgacaactcctccaactaaaggtccaatcaactggtttgtatttgactgggtaggcgagatgagtcgtcgctttattctggaatttcgtgaagaagttttggaaaacaataatcgtccattgcaggatcgaaaagaccgaccaatctacttttactgatggtctagcgaacgaaaggaaggttacgaaatggatcagtttcaagagtacctaacaaaagaattgtcagaggcacagcgaaaagtcctggagccattatttgaacatatattaactgaattcccggatttgcagactcgaattgcttggaaccagccgatgtttacggatcatggaaccttcatcttggggattagcagttcgaagaaacatttctcagtctcgccagaagtgaaaacgatggccttgttcaatacccgcattgaagcaagtggctattcacaaacaaaaaacatttttcgtattttatgggatcagccggttgacgaaaagctgatcttcgacattatccgttttaatatgaaagacaaagcggattgtcaaaccttttggcgctagatagtcgttctgaaaataaattttaatggccaacaaaaaagacgatttattcgtcttttttgttggtttaaatccgggatcatcagacaatagcgaccgaattatgctaaaatagtggaaaatacacgaaaatccttttaaaaataccaactattgtgaacgaaagtacaattgaatcttttttaggaaaaagagcagagtccgttaagcttttttcttttagttgttttatagtgtgagaaaggagacttctatgcatgcatgggaagccatacagaaaacattggaccatattgaagcaaatttagctgagacaatcgaaattgatgagttagccaaagttgctgctttgtcgccgttttattatcagcgtttattcacgcgattagtcaaatcctcagtcagagagtatatcaagttacgccgtttggctgtagcagccacctatttacaaaaacagcaacggcgaatcattgatgttgcgctggaggttggattcaataatcctatttctttttcgcgatcgtttaaagaagtttatggcatttcaccctcacactatcagaaacagttgctcccattacaaaatttcgataaaccagatttatcccttagccatattgcggtagaggaaggggaaccgttgatcagtgaaggagtcgtcttagcaatacagcagaaaataatggatcagccgcgggttttcaatggtatcgttggttattatcctttcaagtatggcaaaatgctaggagaaagaaccggcgtagatccagctgaaaagatttggcaagacttttttcacgcttgtgccaatcatccatttttgcgagcagagacgctcattggtgtttcctatcctggagaggcaccagcaggtcattccagttattttgtcggggcagaatctgtcactggaagatatgagaaagacatgagccatctgacaagctggacattaccggcccgtgactatgttgtttgcagctttgagacgactaaagcacaaatgatcgtcgggatgggtaaggcaatgaggtatactcgtttttggctaaaaaaacacggtttgatagcggatggcttttttcctgagctttatcgacaatcgcaagcggagatcatgattgtcgaattatggattccttttaaaacaagagaaaattttcaaggaggaaaaacaaatgatgaattatgaagagggcctgacattactggaagaaaagtttggtaacgacaaagacaatttgatctctttagcaacgattgcgcgcaattgcggtgaaaatgggttgcctcgtcctatggtgcgggatgtagatgcttattatgagaatggtgtcttttatgtatcgacccatgaaagctccaacaaaatccagcaaatcaaagaaaatcccgaagtttctatcgcagtctgtggcgaatggtttaccgctaatggcatcggagaaaatctaggatgggtcttggacccaaaaaatgcggaattgagaaaaaaaattcgcaaggcgtttgtttggtacgatgaagttaatgatgaagcggatcaaggctgttgttttcttgccattcggttaacgaaagggacattgaatatcaatcactgggaaaagctctatcattttgattttgaaaataagcgcatgattgatcaaaatgatactttttaaccaccaacaatgcatcgattccattgatcagtcatctggactagcgttgtttcgatgaaatggcttggctgatgtgtccgagagcttcttagcgtttccaagtatttttccataaaaaatgagccgcttacggatttgttctatccacccattctcagcgattgacgagaaggctgtgtgttagagacatgtaagcgggtcatttttttaattcttcgccaacttttttggaaaatcagcaaaagaacagcgttagttttgttttaaatccaaaattgtttcctcaggtgttacataataagtcgtctggttctcataaatcacaaagcctggttttgcaccatttggtttgcgaatatgtttgacttgtaccaaatccacaggtacttgtgcggagtggcggtatttcgagaagtaggcagctaattctgcagcttccaagattgtttcttcgctaggtgaatccgaccgaatgatcacatgagacccggggatatttttcgtatggagccaataatctgttttacgtgccgtttttaaagttaactgatcattttgcagattgtttttgcctaccagaatctccgttccatcagaagagagaaaacgttccggttgcgagggcgtttgttttttccgttgtttcgtccgatttttgacatatccttgggcagcaagttcttcgcgaatcgtcaaaagatctttcggtgcggcaatttccaactgtgcttctactgattccaaataggcgatctcatcttttgtttcagcaatttgctgatgaatcagtttgacagcatttttcagcttttgataacgctggaaatatttttgcgcgttctggttgggtgtcaaggccggatctaaggcaatttttattggtttgttctcatcatagtaattagctaattccacttcgcctgcaccgcgagggacttgcgccatgaaagtcgttaaaagctcgcctttttgacggaattcttccgcattctcagattctcgcaaagtttgctgtcttttttctagcttgtgcttgtttcgcttcagctcattgtcgatttttttcagcaattcactgccttgctgttttactcggtcacggtcagctttttcatgataaaacgcatcaagcaatgcgcttagactctggtaagtttcctgccagtccgcttgttccatcagtgaatgaaaggggaccggagtaaagaattctttgttcccggattttaagtaggtaggaacaggatccgctagctcggcaaaaaattcttcccaaacggttactttttcatttggtcgttctttcagacgagataccagctcatctgccgtatccctgccaaatccttgaaaagtctgctgcaagactttgggcgacaattcttctagacgagacagcatttcaaagacttttgtttgattgagtgtatacggatcaacagtgtcttgttttggcggagcaacataaagggaccctggcagcaaggtacgatacgtattttgcgaatggccaatgtgcttgatcgtatcaacgattttaccggttgcccgattcattaagagaatcgtgctgtgtctgcccatcaattcaacgatcaaaacaaagttttgtaaatcgcctaattcgtcacgacgagtaaaatggaaatgaacgactcgatcattcgcaacttgttcaatcgtttccaggattgcgccatctaaatacttccgtaacatcatcaaaaatgttggaggtgtttctgggttggtataggtagcttgtgtacattgaatccgagcatagctcggatgggcagatagcaataatttgtgatttttcccttgagaacggatcacgaagatcacttcgttctcataaggctggtgaattttattcactcgaccattaacgagttcattttgtaattcctgaaccatcaagtgggtaaagatgccatcgaaggacatttgtttccctcatttctgttttatcaaacttttttctcattcaatttttgaggtcaagacatttgaccgataaaggcaagtaaaattaacgaatccagattgaatcgagtagttctattataacgaaaagaaaccagaaagaccaatcctgatccaagcaggacataccccatcagatttaggatatattgaagcattcactaagagtccgttttattgttttgtgcatcctttagggctttttcaatctccatattcaagaaataggaaatgactgttcgaatgactacgactactgctaagcggacgatatcggcaaatgtcggatggatgatggtctcaatgatatctgcagcaatcaagatctccaaaccaagcaaaacataactgccgagaaaatttcgaataaaattgttttctctggccgcactcatacggtctttcgcttttatttcaaaacgaataaaatcaaaaccagcttttacaactccccacacaagcactaaaattgaaagcagattcagacaaacgacgattaaatctaaaatggggattgcattatccattaaaagttcagcaagatcagccatgactaactcctttggttttttctctatcttatcgaattttacttaatatgggaagttatatgggaagtttcttgacgctccaaagacatcttgctagtataaagataagttgatggcagatgaaaagggcggggtttaggatggagcgattcgagaatttttttcagttggtaaaagtgaagatgcgagaaagctgggaagcttttgtccaaagtgtctaccaaaatcagcgtaagaccatgtattatttaggtacaggtattctacttgctgtgctatttgctgtagtgattattacttctcaaacgaggatcaaaacatcgctgatccacaagatggcttttgaagaattgccttctgataagatcgaaccattagaatatgcagaagcagatcaaacgattcgggacacaaaagccatttcggtgatgtttagtaaaccgaatggcgaagagttggcagaagtgtttcaattgtttaatgataaagagagtgaaatgaatcgatccgtgtactattatccgatcgtatatgatacacagtcttttttagatacttacggtgtaaaagcaaatgaaatcacctttgttttctttgaaaacgggcaagagaaaaatcggtttacttatcaatcacttaaagatcctgcagaagaatttattcctgaattgaatcggttaccaatgtggaatattcgcaaattagcagagtaagaaaaaatctgacaatttgaataaaagttattgacgttcttttattaatacgctaaactaagtgaaacaaagttaaacaaatggaaaaaggaggagctaatatgagactattttacgcattgcaatcaaattcatggcaaaactggcgtagatagttgtattggtggacctcaatccatagatacaactttttagagaaccttctaaagtgctgtatctatgctggtaaatgaatctttcaccgcatagaacgattagtctatgcggtttttgcttgaagcaactgccggattgtcggcagttgctttttttagttctcaagtatcaacaaaaaaatgagaaagaagcgaggagagttaaaaatgaaaaacaaaggattaattgctgcagttattgttatttttggatttttattggcggcttttgggtaccaaatgggagcaaaacaaacaggagaatccgctgaacaaccgacggatcaaacagcaaaaaaagaacacaaaacggtgggtattctgcaatttgtcagtcatgaagcgctcgacgaaatcactcgaggcgtcaaagaagggttaaaacaatcgggttataccgaaggggataatttaacaatcgaatttcaaaatggccaagcggatcaaagtaaattagcgaccatgagtcagcaattgctgaacaaaggcgctgatgtattagtagggatagcaacacctgctgctcaagcattggctaatactactaaggatgtgccaatcgttttaggcgcggtgaccgatccggttggggccaatctagtagctgatatggataaacctggaggaaatatcactggagtatcagataaaacaccagtagctactcagtttgaattagcccaagaattgatgccagaggcaaaatcagttggtatcttatattcttcaacagaggataactccaagtatcaagcagcagaagcagaagcggccgcagaaaaatatggcttgacgtcaaaaaaatatgcagttccttcaagcaatgaaattgctcagacggtacaggtgatggcagaaaccgtcgatttcatttttatcccattggataatacgattgccaatgcgatgcagacggttgtcggagaagcaaacaaaacgaaaacaccaatcatcacctctgcagaaaccatggtgcaacaaggtggcttggcgactgtgggtcaaaatcagtttagcttaggtgtccaatcaggtaaaatggcagctgcgatcttaaaaggggaatctgatccagcaacaacccccatctatacttttaaagatggcgatacggtcattaatgaaaagcaagctgaatttcttggcatcactattccagaagcactcaaagaaaaagccagactcatttctgacgaagcgaccgaaacaacatcaagcacagactaaccattgaaacagctgctcttaaaagggttatagcaatgctaactaacgtttcataaagaaacaagaaaaaaatctattgcttttaaggaatatgtgtcctgacagaaacttcttgttgtcaggacaggggtttggaagacagatagaaaaacaagtaacgaggaggaaaaaaaatgatcgtttcagcgattgggcaaggattcctttgggggattcttgggttaggtatttttatgacgtatcgaattttaaattttccagatatgactactgagggctcttttcctcttggcggcgcggtctgtgtgactgctatcacgcaaggtgtctcaccgatagtagctactcttttaggggttggtgcggggatgtgtgccggattagtaactggtctcttatatacgaaaggcaagatcccagtaattctagctggaatccttgtgatgtcgggactaaattcagtgatgctgtttgtgatgcgctcgccaaatctttctctattgaatcaaccaaaaatccaagatttcttcacgaagctaaatttgcctaattactttgatactgtgttgatcggattagtgatggtattagtgatcggggctgtcttgctattctttttccataccaatcttgggcaagcctatattgctacaggagacaacgagcatatggctaaatcactagggatcaatacagacactatgaagatcattggcttagttgtttccaatggagtgattgcattatctggggcattgatcgcccaaaatgatggttacgcagatgttagtaaaggaatcggcgtcattgtaatagggttagcatcgattatcatcggtgaagtattatttggcgaactaacattattggagcggctcgtagcgattgttgtgggcagtatcatttatcagctgttgatcctatttgtgatcagagctggctttgatactacttacttaaaaatcttttcggcgatcgtcttgacgctttgtctattgatcccgcaattcaaaaatgcactgcacttgcggacgggtttcgaaaaggaggaagaatgatgttaacgatcaataaagcaaccaaaatcattggcaatggtcctcatgaaaagaagacgctcttacagaaagtagatttaaaactgcaatcaggggaatttgtgactgtagtcggcggcaatggtgctggaaaaagtacattgtttaattgtatatccggttcactgccacttactagtggtcagatcttgatcgatgaccaagatgtcacgcagttgtcagaagaaaaaagagctgcttacttgtcaagagtctttcaagaccctaaaatgggcactgcgccgcgaatgaccgtcgctgaaaatctattgttggcgcaacgtcgtggacagaaaaggaatttgcatttgcgccaattacaagtacaaaaagatgtttattaccaattatgtcaagaagtgggcaacgggctcgaacaacatttggatacaccaacaggaaatttatctggtgggcaacgccaagcattgagtcttttgatggcaacgatccagaccccaaaattgctgctcttagacgagcatactgcggcattggatccgaaaacgtctaaacagttgatgcaaatcactgcagatcgagtggaacaacaacagttgacttgcttgatgatcactcatcgcatggaagatgctctaaaatatggcaaccgattgatcttgcttcgtaaagggcagatcgtgaaagatttatccgcagcagaaaaagcgcagcttcgtttgcaagatctattactattctttgaagacgacctttagaaaaccgaatctaccagtgaaaatcgcagaaaaaaataaatgaaaaccagtgaaatgaaaaaaataagaaaaaatcattgacaactttcaaagttcaacctatacttaggacaatcttacatcagtttggagcgaacaatcatgaaacaattgcaagagaacccctcacaactgaataaatattactttagctattttagataggtttgtattcatgaaagacatgggtacaaacactcgtttgtatctatgatggctaaggcatttcgtaatgactttaaagccacgtagatcgtaaaatctatagtggctattttttatattcacatatcagctgatatgtaatgtttgaaggtgttcactgtagattctatcaatttacagtggacatctttttttgttgaaaggaatgaataggatgaaccaattaatcactggacacacccgtttagcagcgttgtttgcgaaacctgccaaacacagtatctcgccagccatgcataatctttcttttgaagatcaaaaagtggatgctgtctatctagcttttgatgttgatccagaaagtttagcagcaagtatccaaagtattcgtcagcttgatttgttaggagtcaatttatcgatgccgcacaaaatggcagctgttcctttagtcgatgaattatctcctgccgcagaactgattggtgctatcaatacaatcgtcaaccacaaaggtcatttgatcggtcacaatacggatgggattggatttatgcgagcgctaggagacatcgaggtctcgattattggcggtaccatgacagttatcggcgctggtggagctgctacagcaattattagtcaagctgccttagatggggtagaaaccattcatgtttttaatcgaaacgatgaattttatccagtgattgaaagcaagctgcaacaaatcgcggcggctactacctgcaacatcacacttggtgatctagatgatcagcaagcattgggtctggcgatcaaagagagccaattgctagtaaatgcgactggtgttggaatgaagccgcaggaagatgccagcccattaaaagaccgcggaatgttacgagaatcgttggcagtttatgacgtgatctataatccgcgagaaacacggctgttgcgtgaagcaaaagccgcgagagcaaaaacagccaatgggttaagtatgttgctttaccaaggcgcggcggcttttgagctatggactgataaaaaaatgccgattgagaaagtcaaaacactgattgaaaaaatgtaaaaaaactaataactatgaaggtaggaagaaaaaatgatcgtaattatgaaaccaaatgccacggcagaacaagtagaagttgttgtgaaacgaatcaaaaaagaaggattagatgtacaggtcaatcaagggaaggaacaaatcgtcattggacttaaaggagatacgcgtctgatccaagatgtcgcttttcgcagctacgatggtgtagaagacgcaattcgtatttccaatacgtacaaattgacttcgcgggaatttcatccgcaggacacggtagttgatgttgatggtgtcaaaatcggagatggacatttcgtaacaatggctggcccatgttcgatcgaaggattagaacaaatccgtgaatgtgcacggatcgccaaagctggcggtgctcaaatcttacgaggaggtgctttcaaacctcggacctctccttacgctttccaaggtctggaagaagaagggctgaaatacatccgtcaagctgctgatgaaacagggatgaaagtcatcactgaagtaatggacgaaggacatatcgatatggttgcggaatacagcgatattttgcaaatcggtgctcgtaacatgcagaatttcaaactattagcggctgtcggtaaaacaggaaaacctattggattgaagcggggaatttcaggaacaattgatgaatggttgaatgctgcagaatacattgctgttcaagataaaagtgaagtgatcttcattgagcggggaattcgaacatacgaaacagcaacgcggaatacattcgaccttagtgctgtaccgatcatcaaaaagttgagtcatttcccaattatcgttgatcctagtcatgggacaggtatctgggatctagttccgccaatggctagagctggggttgctgcgggcgcagacggcatgatcgttgagatccatccagatccggcaaatgcttggtctgatggtcctcaatcattgaacgaaaaaacctacatgaatatgatgaatgaagtccatatcatggaaaaagcgatgaaagaaatcaaagcactgcaaaaataatcgtcgtttttcagctgagagtgacagctatttcagaagaaatcaagtcattgtgaagtctaaaaaaaggagtgtaccatttgatgttacacataaatttagcagaacattcgtatgatattgtcattcaacgaggtgcctttcaagaagtagggaaatgggtcaaaggactttggcaacctcaaaggattgcagtgattacggatagtaacgtttccccaatctatggacaagtcattattgatgcgcttactcatgaaggatttgcagcaaaattacttgttgttccagcgggcgaaaagagcaagtctcttgagcaagcgacgattctttatgatcgtttagcagaacttgggttgacccgaagcgatggaataattgcgctgggcggcggagtaatcggtgatttagcaggtttcgtggcttcgacctatatgcgaggggtccattttcttcagattcccacgactttattggcgcaagtagattctagtattggcggcaaaacagctgtcaatactggaaatgctaaaaatttggttggaacctttgcccaacccgctggtgttttgatcgatccagaacttttacgatcattaccactttatcgcgtacaagaaggaattgcggagatcattaagtcggcagcaatcgctgatgaccagctatggcaaaaactagccgaattgcaagatgaggcggcattattggaccatgcagaacaagtgatcaccgcggctttaacggtcaaacgaaaagttgtcgaggaagaccctttcgatcatgatagtcgcttgatgttgaatttcggccataccatcggacatgggctagaaaaaacagcagcgtttgaaatcagccatggtgcaggagtagcaatcggcatggtgatggtcacccaacacgcggagtccatcggattatctccaaaaggaactacggcccaattaatagaaatgatcagcaagtttcatttgcctactcagtcagaatcgcttgacaaagatcagttgtatcaagcgatcactcatgataaaaagacccgaggaaaccaattgaagattattttgttagaaaaaatcggtcaagcgaagatcgttacgatccctacagaagaaattaaaaattatttataaaaaagagaggaagcgacggatgatgcgttatattacagcaggtgaatcccacggacctgaattgaccgcaattattgaaggtctaccagcgggattacccttaacagcagcagatatcaatcacgaactagcgagaagacaaacgggttatggccgcggcggtcgcatgctgattgaaaaagatcaagtccgtattacttccggcatccgacatggaaaaacattagggtcgcctgtgacattggtggtggaaaataaagactggaaaaattggacgaaagtgatggcaatcgaggaagttcctgaaaaagatcggaaattacgacgagtggctcggcctagaccaggacatgcagacttggtcggaggcatgaaataccgtcatcaggatttgcgaaacgtcttagagcgttcctctgcgcgggaaacaacgatgcgagtggccattggtgcaattgccaaaaaaatcttaaaggaattagagattgaagtggctggccatgtgacaatgcttggcggcataaaagcagctattcctgatggtttgactgttcaagaaattgccgagcgctccgaagcatctgaagttcgggtgttggatccttctgtcgaagaagaaatcaagcaattgatcgaccaaaccaagagaaatggggatacgattggtggcgtcgtagaagttctaatcgggggtgtccccgctggtctaggcagttatgtgcagtgggataaaaaattggatgccaaaattgcgcaggccgtggttagtatcaatgcatttaaaggtgttgaatttggtgtcggatttgaagcaggagtcttacccggttcgcaagtgatggatgaaatcctctgggatcagcaaaaaggatacacgcgtcgcagcaataatttgggcggatttgaaggaggaatgacaaatggagaaccgattgttgttcgtggagtgatgaagcccattccaacgttatacaaaccgttgcaaagcgttgatatcgatagcaaagagccctacaaagcaagtgttgaacgttcagatagtacggcagttcctgcagccagtgtggtttgtgaaaatgtcgttgctacagtagtagccaatgaaatactcgaaaaatttccgagtgactcctttgaagaattacaaacagctgtccaagaataccgtgactacttgcttcattactaaaattcattactaaaagtagtagagtttatcccactactaaaaaatatcttgagaaaaaggaaacgagggacattccaatgtcacaaaaaatcatgatcgctggtctaggattgatcggtgcttcgttggcaaaatgcatcaaaaaagctgttgctgacagctatctgattggctgggatcattgtgaatcgaccaatgaaattgccatacagtcacagattgttgacttcgtgccagcttcatttactgaaggagcgatccaatcagatatcatcattttggcacttccagtggagatcacgaaagcttatttggctgaattgggaagagtaactttaaagtcaaatgtcttagtaacggatactggtagtacaaaagcagagattgttcaatttgcgcagcaattctcctttgattttattggcggtcatcctatggctggctctcataaatcgggtattttagcagcagatgagaatttattcgaaaatgcctactacattttcaccccgactactagcaaccgcatgaatgaactgcagcgattgtttcaagggaccagagcaaaatacgtcgaattggcaccaaacgagcatgatcaaatcactggaatgctaagtcatttacctcatattattgcttccgggttagtcaatcaggcgaatacgtttaatcaatcacagcctagggctcagcaactagccgcaggagggtttcgggacatcactcgcattgcttcttccgatccccgcatgtggacggatattttattaagtaatcgacaggagcttttgcagctaatcgcaacctggcaaaaacaaatggagcaagtatcacagtggttgctgaccaaagatgaaaaagcaatattccgtttttttgaagatgctaaagaaacaagagaccatttacctatccaccaaactggagcaattccagcgttctatgatctattgatcgatgttccggatcatccgggtgtggtagcagaggtcacccagctgttaagcacgggcaatctctcattgatcaatttaaaaattttagagacgcgtgaagatatacttggtgtcttgcagatttctttcaaaagtcaaaaagagctgcagcaagcccagcagctgatcactgaaaatacgacctatcaatgtcggataaaataggagaacaatgatgaaactacttaaagctaaccacctaagaggcacactgacagtcccttcagataaatctatttctcaccgcagcatcatgtttggtgcattagcagaagggacgacgacggttcgtaattttttaagaggggaagattgtcttagtacccttcacgcttttcaagaattgggagtccccattcaagatgacggcgagacgatcacgatcactggtcaagggtttggcggtttgaaagctgctgaccgttcgattgatgtaggaaattcaggcacaacgattcgtttaatgatgggtattttagccgggcaacctttcacgactactttactgggggatgattcgttgaatcagcgaccaatgaatcgagtgatgttgccattgaatcaaatgggtgcgagacttaacggcagcaatgaaagtgagtttccaccgattactattcaaggtacacgcgatttaagcccaatcgattattcaatgcctgttgctagtgcacaggtcaaatcagcgttactttttgccgcattgcaagcacagggtacctcccgaatcgtcgagaaagaaccgagccgcaaccatacggaagaaatgattcgtcaatttggcggcgagatcacggttaaaggaaaggagattcaaattacaggtcctcaatcctttgttggacaagaagtgattgtaccaggtgatatttcttcagctgcttttttcttaaccgcaggagctgttttacccaatagtgaaatcacgctagaaaatgttgggattaatccgacgcgaacaggaattttagatgtgctggaacaaatgggtgctcagatttcactgacagcgatcgatcagaacaatcaatcagctacgattactattcgttcttctgcattaaaaggaatcgagatccaaggcgcgatcattcctcgactcattgatgaattaccaatcatcgctttgttagctacacaagctgtcggccaaacggtgattcgtgatgctgaagaattgaaagtcaaagagacgaaccgaatcgatgcgaccgcagaagaattaacgaaactgggagcagatatcacgccaacggaagatggattgattattaatggtccgacgccccttcatggtggtaacgtgtccagtcgcggcgatcatcgaattggtatgatgctgcaagtagctgctttattgacgcaagaagatgtggaattagaacaggcggaagcagtagcggtctcctacccccacttctttgaggatctccgccaattaactggaggtgatgttgaatgaaaggaatcgttttgatcggttttatgggtgctggtaaaacaactattggccgcttattagcagaacgattacagttggcacatgttgattttgacgatctgatcgttgaatcgatcggcatgacgatccaagactattttgatcgttacggggaagccgcttttcgagaaaaagaaacggagattttgactcattcattaacacttgatcaagtgatctctactggtggcggcatcatcctaaaagaagaaaatcggcaactattgcagcaatttccgaaagtcgtctatttaaaaacggagccagaagaattgctcgatcggttgaaaaaggatacggtcaatattcgtccgcttgtcgtttcgaaatcgccggcagaaatcattgatatttatcgtccaagaatgccactatacgaagaaagtgcgacagtagtgatcgataccacccgcaaatctccagcagagatcgtgactgaaatcattcaaaaagcaggtgaataaatgaagattggttatctaggcccaaaaaactccttcacttatcgagccgcctgtgaatcttttttaaatgaagaaatggttccttttggatcgatcccattatgtattcaagcattagtagcaggggacatccaacgagcggtagtccccaatgaaaattcattagagggttcggttcatgcaacaatcgatacacttttccgacaaaaggaactgatcattgaacaagaagtgattttgcctatcaaccatcagctactgaccattcagtcaggacagccgatttccaaaatcatttctcatccacaggctttggcccaatgtgcggagtttttgcaacataacttcccagatgttcctattgaagcggtggcatcgacgactgctgctgccgtctttgtcgcagagcatccagcggagccggtagcagccattgcttccaaagaagcagcccatgcttatggtctattcattcaggaaaaaaatatccaggatacgactagcaaccaaactcgtttttggatcttgcaaaaagacacaaacgaatcgagcgttttccatgataaggcaacgaaagccacgatctatgtgaccttgcctaccaatcgaccaggtagtctgcatcagattttggccgcttttggctggcgcggcattgacttgagcaaaatcgaatcccgaccattaaaaacgagtctaggggaatatttttttgtgatagatttagtgctaaatcagccttgggccttggttgagaatgccttagaagaaatcaggatgttaaattgtaatgtccatcttctaggttcgtatgctgtgaagaaaataggtgaaggaaatgaaagagaggaaaatcagtccttgcgaggatgctgatttattagctaaactttatcaaagtgttcaagaggtccatcatcaattgatacctaacgttttcaaatcctttgactacgaggcattccgcgacttgttacaggatttgcttgccgcagaaacgcatcatttttttgtagcctggcaaaaacaaccttgcggatttattcatctaaaagagattgagttatcggatacaccgctgatggtctctcaacgtcgacttgagatcgaagcgttatcggttgaaaatgcgtaccagaagcaaggggtcggtgaagccttattaacccatgccgcagattttgctcgagaaaagcagtttgcaaccctcactttgaatttctgggccaaaaaccaagtggctgatttttaccaacgaaatggttttcaagttgaacgttacagagcaagcaagattttatgagccgcttttcatctttctatcaaaaagttgctaggaaaatcttaaaatttaaaaaaatagctttctttctttttttcgtaaggtattcttataagaaagaaaagctttttttatttggaggaaactgtcctatgagtcgaatggaccgcaacaaaaaattgcatgaacaattagcgaaagaagagcaacgagctgctcataaagaaacgatctttgctcgtcgagaaacaaaatctgtgagaagacctcaaaaggaagaagagtattcagcagaaaacgattttgcacaacaaagggagaacgaccaaacaagtcagaagcggtcttctggcaatcattcgtcaaaaaaaacaacccttcagcggccgaatctgttaactggcaaaaaaaacaagtcaaaatcctttggtaaacaaaaggatttcggcaacaatggtcagtcagttaacaagaagccagcgaaacaagagcagaaagtaaaatcaaaagaagctaaacgtaagaaacggccaattttgcgtttcatcctgtatgtgctagtgtttgtacttgcttactcgatcgtggcttttgtggcagggcagcaggtggccaaaagcgatgcacaagtctcagagacggaaacgtttgatggtgtagcatctgcgaacggagcaaaaaatattttgcttttaggaagcgacagccgtaaaggcgaaactggtcgtgcagacacgatcatggtgctgcaattggatggcccttcaaagaaaccaaagctgctttctttcatgcgggatacgctagtcacgattccgggatatggagaaaacaagatcaatgcagcttatgcatttggcggggcagagttagttcggcaaacgttagctgaaaatttcggaatccaaacgaattattatgtcaaagtagactttcaatctttcgaaaaagtgattgacaccctttttcctagtggtgtaccgatcaacgctgagaaagatatgagtaaaaaccttgaagtccctatcaagaaagggcaacagaatatgaacggtttagaattattgcaatatgcgcggttccgtatggatgaagaaggcgactttgggcgtgtgcgtcgacaacaacaagtgatggatgctgtgtttaatgccatgaagaatcctttatccatcgttaaattgccatacgcagcagggaaagtcctagggtatgcttctactaatctgccagttagcttcttgctgagaaacacattttcgattgccaaaggcgcagggggcattgatcgcttaactgttcctgtcgatgattcatggcagtatggctcaacctatgaagcaggaagtgtgctggtcatcaactttgataccaataaacaagccatcgaaagtttcttaaatcagtaagtttaactgaaaactttttgaaaagagttttgaaagcttactggtttatgctatattattaatgacgtttgaaatatgttgaaacgaggaaaagaaatgaaattagccgttgttactgacagtacagcttacttgcctgaacgcatccaggatcacgctgacttgttcgttatcccaatacctgttattttagatggaaaaagctataacgaagggatcgacattcagccagatgaatattactctttgctgaaaaacagtaaagaatttcctaaaacttctcaacctgtccttggtgaagtgattgcattatacgaaacccttgcccagaaaggttatgatacgatcttaagtattcacctttctagcgggatttctggctttatcaatacgttatatggtatcaaagatgatatcaaaggcgcgcgggttattccctatgattctaaaatcaccagcatgccaatgggacatatggtagaagctgcgttggatctgaaccaacaaggcaaaaccattgaagagatcgtgacccacatcgatcgcatccgcgataatacgtatgcttatttgatcgtagatgacttaaacaatctcgtgcgaggcggacgtttaacaaatggtgctgcattgatcggcggattattgaagatcaaaccgatcttgacttttgacgaaggaaaaatcgtgctttatgagaagattcgttccagtaaaaaagcttttaatcgcgcagaagacattattggtcaaagagaatcagaaatcgcttacccagtgaaattctatgtgatccatgccaataacttgtctgtggctttagaggaaaaagcaaagctgcaaaagaaataccctgatgccgaaatcgaagtgggtcattttggtcctgtgattggttctcatttgggtgaaaaagcgattgggattgccatcgcagcgcaataataaaagtgagttatttattcctatgcaattatttgatttttataaaaatacctatgttacttagaagcttgtcaagggattccttttgctagtttctggtcacatgggtatttttttgctttaaaagcatcttgcttgtttatctgattcacactgactatacttaatccaattactactttagtaaattactaaacaggaggatggaaaatgaaaataccagaaaacttaaaacacaaacccgtcatcaaagttgaagactatgatacagtagatggacgctatgcgcttcatacggatgcgaaaggcttatcgttgggtctggcacaatggaatgatcgaggaaaagtagatatctcagggaaagtatggcggcacacgggggaaaagtggtctcgtcaatcagaagaactcccattatcacggattcttgacttagcgatccttgtcgcgcaatctagcctctattttcaagatgcctatcgtcatgaaaagttttatgatccagaaaacccactcatcgatattattggactgcaaggaaatcggatgacagtagaagttgatacagacaatcctaaaattgatgaggatattctattgttctatgatgccttgcaaaaagatggtgaattgatcggtgaacgttttcgaattttaagtcggttgttaaacgaattgggctattaagaaaggaggaatctacatggggatcaatcgtaccccttttactttgacagaaggtcgacagttcagcaagttagaacagcaaatgatttggaaaaaaccagcgagtcatcagacaagtcaagaagaactgcggatcgctcaagaaatcaagctaaactggcaagatccagagatgaagattttcaatgttttattggaaggagatgctggctctggaaaaacgcaattagccaaagctctctcctatgatcttcaattgccttataccaaaatcacctgttttgctgatatggataaatcagatgtttttggtgcattgttgccgatcgtagcaacagatcaagaagaagacagtgaattgttagaagcgatctatttgagtaatagcttagatcaggtcattcaagtgattgcggatcactattcgctcaccagtgagggtgcccgagaaaaattagcagacttgattcgacgacttgaagaaatagatacgaccgatgtcgttcattataaattttatccttcggaaatcgttcgtgcgatggaaaaagggtatctattagaaatccaagaaccaacagtcatccgggatgcctcggtactcgtcgctctcaactctgcattggagcaaaatgggatgctgaatctgccaactggcgttgtcaggcgccatccggattgtgtcgtcattatcacaacaaatcggaactatcagggcaatcgtccattgaatgaatctcttagagatcggatgcaacatgcggaaaaaatggaccttcctgaactatctgtgatggtcgcacggggacttgctaaaaccggctttcaagatcaagcgatcgctagcaaaatggcagagattattcgacttctcgatacttctgcacgagcaaatgccatcaagggtgtggctggtatgcgatcttatttttattggctgaatacggttaaaaatgggcaatcacctttaaatacgttagcggtcaaagtcttatacaagttaacgacagatccagacgaattgcgtctgctgcaagaagccctcgatcaatcagaattgctcttagagctaagacgtttgtatcaaggacagaaaatgagtcatcgacaaccaatacatggacgcatcgtatctgctgaagaggcggatgcgcgaaatattgaagaagcatccttgcagatggggacagcagctagtactgaaaaaacagcagagacactggagacacctgaggtgctagatacacaggaaacaaaccaagataatcaggaagcggtgcctcaagacactatagatggagactctttagagagccaacattcgtctgatgagggacacacaaaggaaggaagtgaacaatctgctcaagaaccttccagtcagcatctttcgatcgaagaattcaggcaattggataaagaagtaagaaaacaagcaaatcaagaagcgcggcaagcgctaaaacaatctatccatgcgaaagaaggattgattgtgcatcggccaaaactccaagaaaatgctcctcagaaagcccaacaacttctagcaccgttgttgccggtggttgaaacaataacaaaacagttgcttgaattattagaaaatgaagcagcttcttcttatggcaaaggaaaatatagcgggacacgctttgatgcaagtcgtgttgcttatggcgactttcgaacatttgataagaaaaatcctcctcatgaacagccttcattagcgatcgctttacgaatcgatgaatcagggtccatggtacgggagggacggatcaccgctgcacaacaagctgcactcgcagtgagtgtgtttgcacagcgcctagatctcccgctgatgatttatggcgacacagccgatttgtctgtacgagagaagacttctctctattcttataaggaatttgctgaaccttttgattatgtgccggcaaagctgatgtctcttcaaccccgacaaaacaatcgtgatggggcagtgctgcgggtactagctgaaaaactttcccaacaatctgctacgacaaaattactattgacgattagtgatggtcagccaaaggcaatgccagattatacgggcaataaggcgaaagcggatattcaagcagtcatcaaagagtatgaacgccaggaaatcatctttttgtccgctgccatcggacaagacaaagacgtcatcaaagaaatctatggcgcggaaagatatatcgatatcagcaatcttaaagaatttcccaaacaattattaacactgatcagccgttatttctaaattacgattcattcggctgctttttaaataacatccgtcttgcatagaagtgggaggcggatgttatttgtttcttataaaaagaatatgtaagctaaattaaacgaacgttttcaatttctgcttcgtatgctaaactgatcacaaaggaggaacaacaatgactttgaattggcgttatatctatcctttctctactgcaggagcttatttcattcgaagaagaacatttgaagaagaacattgcggatgagttatggactatttacatttgtgagttcgttcttatttttttgtgaaaagtggacattcttttttttcgttggtatgctcttgaacggcgtttaaaacagacttcacaagacagttcttttcaaagttggctctttttactccttattttcttaggggtggtcggtattctatggatcggcatggcagttatctttttcctatatagtcgttcatgtgacaaacaattccttttttccgaaggggaaaaatccgtgacgatccgatttttagtaggacaatcgcttcatttgatggctatcgaggagactcttttttccttgaacgggattggtttggctttttagattggcgattcattaggcgggattgtttttgaacgagcctttcatgattttagccagtttttatcagttgcctgctggattactgaatagcggttcttcagtgatatcttgggcatggcatttactaattggtctgctaggggtcctaggctgttggcttggctacaggagccggttgtctgaaatcgtcaatcgccatgaagtaagttgatgtgaaaggataatgttctatcgatgagaaaaaaatgaacgagtctcgtttgcacttgcttgctaagatgatgacggctaccaacgtaaatcgtttcacttagaaaaccttgcaagcgggatctctagttaataatctttgtttttaaagagaaggggtgtttttttgtttttagagatcaatgctatttccaaaagctttgacaagaaacaaatttttgatcaggtaagttatcaatttgaaaccggaaaaatctatggtattttagggcgcaatggggcagggaaaacgacgttattccaatgtatcgctcggaatatgaccgttgatagcgggagtatttatttagttgaagacggcaatcaacgaacctatgaaaatacagatgtcggatttacattcacgcaaccgcatctgccaggttttatgacggcgattgagtttttgcgcttttttatggatgtcaatcgggagcgcatcaaacagtcgctttctccagaagaatttttaatgtctgtaggaatttcttcagaagagcagcatcgtttaatgaaagattattcccatggcatgaaaaacaaagtacaaatgcttctttctttgatggtgcagccaccaatcatgttgtttgatgaaccattgacctctttcgatgttgtagctgcccatgaaatcaaacaaatgatccgatcagcaaaagaggattcgatcatactgttttccactcatattttacagcttgcacaagatttatgtgatgaagtggtcctactaaataatcatcaattgaccgggattgatccttctcacattcatgaaccagattttgagaaagaaatcgttactttgctgacggagggggagcccgatgctgcaatggattaaactttattggctttatgaagagacgattttttcaacgaaagcgaatggatttctctattttttgaccaaaattcctttgattggaaaacatcttccccatgatctttatgggcaatacggtctcaaaaaaatgctttttactgtattatttagcttgcgcttgatcttgccatttttcacaaaaattatttggctgcttttttattatgcaattgccttggttgcttttcatggttgggagaatttatttggctcttttgatcagtttgaagaacaaataatgattgctggtttttatacttggctagtggtcgttgcactagccagcaattttttttctttgttctcatttacattagatcaaaaagcgattgaattcacggattacttcatggtgtcaaaacgacagtatttgcgaatgaatcttttctttaagacgatccaatccattatttattatctaccagcatttttgttgtacagcttttttgctggcaatagttggctgaccctcgttggtatctttggtgctggctttgcttgtgtggcagctgccagtctaattcgctggggattccaaaagcaatggggcagtggctggcgcatcggttggcgactagccatatctatgctgattttagcgtcgctctacggcttattgcttcaacagattattccaactatgacattcgggttgggacttttggcgttctttctgattgccggcactggctgtttttactacctaaaacactttacacaagaaaatgattttttcctttattctgttgaaaaaagctatcagcaatttagtgtgctagaaaccatcagttcagattcaagtcaatatctcaatgaagggattgaaatgcagaaaaaactttctttggatcaggagaagccactcactcatttgcaaggatcagaatacctcaacggattgctctttcaaagatatcgtaaactgttgcgcaaaaaattgctgaaccgtgtcggtattgtgtctattctatttctaggattgattttattatcctttttgaagattgttccatatcctaatgaagaggatctgacagcactactgccagctctatttttagttatgtattttggttcattgggaaaagcaatcgtccaaatggtttttgttaactgtgacatctccatgctttactatcctttttatcgggagaaagaaacgatcctcagtgggtttaattaccgttttatcaaatcaatgttttacaacggagtctttgcgggaagtatttttgtcggcttcttattatgggacttgctaaatggattgcaagctagctggtatttcattggggtcttatttttattattgacgagtttgacagcattgttctcatttcatgaattatttatctattacttgctacaaccttttactggagatatgagagtggtcaatccggtctacaaatttgtcagtggagtattgtattggatcagctatatcaacctgcgcctgcatgtttctggatttgcttactcgatcgttgtctcaatggtcttattactctatgtttttgtcggatatgtactaatcattcgcttcgcgccgaagacctttaaaatcaaagaataggagagaatcaggactgcattataaaacctattcacaaatgcgaacatatgttttataatgagagaaagttgtgaataggagggtctagtcagatgaaaactacgttgactcttgaaatggaagaagccctttattattactgtcgcgaaaacagtgatattgtcatcgaagaggtaatcatgccggacgatcaaggaatcgttgatactctaagttgtcgcttaacaccagaaaatttgtttgaatggcgctgttatgaattaaaagtcagcctagcggattttcgttcaaaagcgaagctgtcatttattgggcattataattattttgttttgccgcatgcattatatgtaaaggtcaaggaagagattcctgctgccatcggtgtattggtttaccatgcatttgctgatcaagaaaaggggagccctggttattttagcgtcgagaaaaaaccgcagcggcaatctttactcgtcaacgaaaacgcattgttgtatcgtttgatctctgcacaagcacgagaagtggggaaggccaagcaaacagcacgaggtttgcgcgttttctcgacggaacgattgtacaaagaactaaagaaaagggaaccagaatacgatttatttggcggcggggtcaattactacgaccgttttattgaagatacgcagctacaagctattgaagcgctaaaagaagaactggttgcaacgcgagaagcttatttcgaattggaacagcgttttttgacacaagaaaaggagtagcactatgtattatccatattttcgcggcaaacaatttgacttgttggcattaaaaagtctattagaaatggaacagctgtctttagaagttcaacccgtcattgagcctatccggcaatccaagactttttgggatacagttgagctgtttcagaaaaaagcgcatcctttttttgttatcgtcaatccacaggcgggggactttctgacggaagaaggaagtcgtttattacaaacactgcctaacgctaaagcctatatcatcgatcagccaattgaaaccattgactgtcagccggacctttgggttgttcatggatctgctccagcgttggccagtgactggagtaaaaatcagacaccgatcttagttggacaagaattccgtttattgaaaaaaatccagggaccaaagattctcatgcatgatttttttactagactgcctagaaacagcttctatcaggaagtaccagaagaagtgttaccaaccgtttatcagcactacgagcagcaaggattttccggctatagtgatttttctatcgacagcaaaatctattatgcacatagttatccctctaaaacaattgttttacactggctatttattgatcagcagcagaagttgcgaatcactcattttgtttcggacgaatcattagaaactcaaaaagaaaagtttctacagctcatgtcacaagttttgcaacatgaagaaatctatccaactcaaacatcaggcttagagttattacttgaagcatacaaaaaggataagtttccaggtatgggtgttttgcggaaagctgctgtcatgaaccacttggaattaatcagccgttatcattttacatgattgttagttatgtcatcagtcatataaagaaaagtttctctcaggagctgaaatctaactgcagctacaatcatagattttggttgcagttcaatcatcactgaaatcaccaatcagtcatgcatcaaaaatcctaataagcagctgaagcacgctaaaatttgttttaggaagccaactgtacaatactggcattcaatacataaaaatcatcaatctgcgcggcaaagactcattttttactcaaaatggttcactttaagaaaaatcgctgtttttaaggaaaaatacagctcaatcagagggaggagaagtaaattcaccagattttttcagaactttaaaaattatttattttagtttacataatatatattatacaaagttatatttggaaaaagacggttcaaaatgtttttgatttttgcattttgaccctctctcgctgtctttttccccttatgaatgttgaaatcaacaacgattcgccaattttcctgtcattggtgtttatttggctgctaattgatgtattgtcttggtgtatgtcactgatcactagtttaatacatcgatttcatttgattgggtctcgtcattaagatctttcgtttgttactaagtgactcatttgtttgatttcataaaattgttgctattgctgtatatgtttcgtttataagtttatcaggtatcagattaagctgagttaatttccttaaaatcaattcttgagtttacttcaaaaaatagcgatcgatagttataaaatgcatttctgtggttgtgtctggcggctgcgacgatcatttctgtttgagttttcttaattcatctgggtgaaagccaaaccacgggttcaaaccagttgaggcattagggattaaaactggtacggactggaatccgtatagtttcacttcttcgcgaaattcttctttttcttcaatgttcttttcgatatatgggattcgatgagcgtctaaaaataattttgtctttttgcattgaatacaattagttttgcaataaagcgttatcatataatattatttctccatcctttttatttttattggtttttatgttatttttattgtaaatttaattcttgtttaattcaataatctttactcatcaacatataaataaattggtttactactgacctgatgtgagttgagggaaaaagattttgctgataaaagtcattaaaaaagtgtatctatccatccctgtcctgtttgagtttaagatcgccctcactcctatctatttttgcggcaaaatttaaagaactgttcgctttacaaatgcgaacgaatgtttgtattatagtggtgagaggtgattcttatgggcatgctccaaccctacgaagatcgaaaaaaattaaaatggcagggattctttctatcggaacatacaacagaagtcggacaggatgagcgccagcgtcactttgtgtggcctgcaaagccagccatgactagcgaagagatcaatgaagtgttgactttagctaggatcaaaagtcgagcagtagcgatccaatgtgaagaagtcaatgaagacggtctctaccctcctgacgtggtcggcatgatccaaagctacgattctttaggcatttatattgatggacgtaaagtacattacgatgagatccggcatatttcctttttcgaagagacgaaatggttcgcactggatgaatgaatcgtaggcgatgagccacgacaagcgtacaatcggaaagttttttacggaatgtgcaaatctatttttttaaaggaggtttcccctatgcaaacgattaaaggaacagtgacaaagattcgattgctgacgtttacttcttctcccctcgtccgttttacagtaggaacgacgaattgtttgatcaatcgccatagcttatcttttttagcagatgtcacggaaggcatgtctttggtggctgttggcgagtggaatgcgcgcaagcaatttattgtccgtaaatatgctgttcgggggaaaacgaaaattatgatggacatcgaacaattgtctcaacaacgaggaaaggcggttctttcatgagagcgcgggatttgctgacagcattaacgacaacgacacaacaagagtatcagggaatttacttaagccgtaaggaaaccttggtccctttcacgacgattgcacaagatgcttctgggaacttgattttattttttgaacctaatcgtcccccactatccatcaaagaactttatacgagtttaatgttgcacaaaaacttacctttgctctattgggacggtgaagaacgacaaaaggtctatgggtttcgtgaagaagatcgacagatcattctctgatcttttttctgtgagataccaaccaatcattcttcttttcattcatggtatactatagatcaagaaaacattttcaacggaggtaaaaaatgggaaatccgcgcatatacaccatgtcttttgcaagtgtctatcccctctatgtacagaaggcggagcgcaaaaatcgtacccaagatgaagtggatcagattattttttggttaactggttattcgaaagaaggtctgtcccgacaattagcagaagaagtttcaatggaacgtttcttcgcagaggcgcctgacttgaatccgaaaagaaaaatgatcaaaggagttatctgtggcgttcgtgtagaagagatcaaggaacctttaatgcaagaaattcgatacttggataaattgattgatgaattagccagaggaaaaacaattgaaaaaattttgcgaggatagtttttaagtggtcctattctataattattgcgtttcattggtccattacgtataatgagactaccttggcaggggcaaatcgtttgcttcgatccgttgggcattcctgtccgacggatttttttatttaacttcagtctaaaaaaagcgctgtggctcttttgcaggaatcccattttggtacctccctttcttaatgtgattaggaaaacgagtcaaaatgtatacagcattcaggtcacagcgcttttagtattgctatctttctctttttttacgtgcttgcaggtgttctttgtgtctcaaatagaccaattctttctccattttacggtaacggttaaatagatcttgcgagagttctccagaagctaacgcttctttgactgcacaatttggctctgattcatgacgacaatttttgaagcggcatttttctgctaaaagttcaatcatctggtaatgccgatctaatgaagaagcagcaaccgtctccaaactgatttctctcatgccaggagtatcgatgaccattgccccatttggcaagcggaacagctgtctactcgtggtagtgtgacgaccacgcccatcttcttcacgaatggctttggttgtctgccgttcgtctcctagtaattgattgagtaaagaagatttaccaacccctgaagaaccaataaaggctaccatgctttctggcgtcaaaaatggttcgaattgcgtccgctcatctttgtagatggtggtagctaaaaccggcaaagcgaatgtcagcttcagctggttgatgattgcttctgtttctgttgtgtccatctgatcgatttttgttaatacaatgactggattggctccactgttccaaacaatcgtaacgaaccgctccaagcgagcgagattaaactcttcattggcgtttgttgtaagaaagacagtcgtcacattagcagcgattccttgttcgtctggtcgatttccagctactttccgctgtaaaaaactttttcgcggcaagacggtatcaatcaaaaattgattttgatcataacaatgccccattacccgatcgcctacgatcggatagtctttcaatgctgttgcttgctggcgaaactttccggagacacgggcataacgttcttctcctgaagacaagactacatttgccagatctttcgcttgaaagataacaattccttgattttccatgaatttcctccatttatgtttggaggtgccactctataaagggaaacctccatgatcttgacgtccattataagtattcatatgacatttcccctttcgtgagtaaattcatcgattgatgtatccctagtatagcatttcttgcgattgtcagaccagcttttcttttatagctcaataatgattagccgcaagaaatgctatggagcgttgaatatcccctgtcaatggcttcaaaaccactaaaacgaaaaagctgaaactcacgcgatagacagtcctctttaaactctcttcatcctctacgattttttcaagatagctcctcgctcattaagcaataagcctccccttgtatcactgttctactattatcgttgttccttcctatcttcttctgagatccccattcttgccctatcttccctatgttcattaacttttgaccattctcctttacccattagtgaataatcttagttcttttgtaaatgattcgttatataatattctcttttctatttattcatataagaaatatttggtaaaaaaagtttttttcttttcaactgttatttaaaaaatggtatgatagcagcagaatatttattttttcctcctttattgaaactcgcaaccccatcttacgctcgcgattttacaaaggagcaaaccatatgttaggagaaaatcatggcaaagaaacttcttggtacaatcagtggtcttttgattgctgctgtacttggtatcagcttgtacacgcaaacccaaaaagacccgaaccccacttcatcacctggacactcatctactatacaggtgaaacagtcagagtcttctaaagcatcagattcgcatacaaaagaaacccagtcagcaaataatctcgctgcattgacatatcaagggacacaaaccattactatcaacaacaatgtcccctccttctcacaagataccctctctataaaaaatggtgcatgggaaaaatatggtgatctcgatcgcttaaatcgagccacttctgcggaagctatgttgaatcaatccctgatgcctactgaaaaacgcggggatatctctagtgtcgcgcctacaggctggcacaataaaaagctgaaaaaaggttatctttataatcgaactcatttgatcggctttgctctggcgggagaaaatgccaactggaaaaatctgatcacaggtacacaacagttgaataatcccgaaatgttacgctatgaaatggatatcaaatactatttagaacaagatcccagccattatgttcgttattcggtgactcctatttaccgcggtgatgaattagtggcacgaggcgttcaaatgcaagcccaatcgattggcgataatacgatccgcttcaatatttatatattcaatattcaagatggtgtgacgatccattaccaagatgggacaagtgtgctttctgaagaagcatctgatgcgactagcacttcggcaaaaaatactacatcgaatgttgctgaagatgaaaaagaatatgtagacgcgaagggaaatggtctgataaaagggtcaaaaaatggcatttatcatctgccaggtacgagaggctatgaacagacgacaaatccaaaagaatggttcaaaacgattgcggaagccaaagctgctggttatcgagcaccaaaataaaaaagcctatggcttttttattttgagagcatccctattcgacacgttaaccttatagcgcttgctcgcaccttgatttttgtaactctgtcaaatagttatttcctgcttctgttaaacgcaatgtgcgtgattttggaaatttttctctcgtgattaggcctctattttccatccgaagtagatgacggtgaatgagagaagttgatttgattccttcatgggcacaaatttctcgaatagatggtgctcgtttctgttcttgctgataagcatcaataaaaaataagatccgatctcttctaatcatattttcctccagggggtagaagacaaaagcaacggacaattgaaaaacctaagcgtttatttcctataggtaatattataaatgaaaaattcccttggaacaacagtttttgaagaagtcgctggcttttcatcgcatttgttttcttttgactttatgatgaaaagagtagaagaaaaaagtgaggcgttggtatgagttttggcgaaaatctaaaaaaattccgagaagaaaaacagctcggcgtcaatcagttggctttgaaatctggagtcagtgcagcgcaaatttcccgctttgaaaatggtaagcgtaagacaccccatgtggatactgcaaaaaaattggcaaaagcactctcagtcccattgcctttattgattggtgaatccgtttcatatgatgaatgggattatgacgaaaatcaacggcgagtggcccatcaaatcaaagatatgaccgaggaagaaatcacggatatcttagaatatatcgcttttgttaagcaaaaaaatagaaaacgctaattgaaaaaagccatctgtctctaaaaaaatagaatcagatggcttttggcctgctctctgacgagaattaccagaaatgaaattatcgtggataaactgcttggatactgtcttcaagaatcttcatttgtactagggtttcttcgtctttgactgttttaggctttccattaataatagcttcatacagtccggcataaacacggctatagtctcctacttcagaaactactttttcctcatgatagattccttcatcatcataatacgtcagacagccataatgttcaggaagatcaattccaaagtccgcatgatcaggcatataaaacatttttaaatgctcttcttggcgatctttggtttgtttgacaaacatgcctttcttaccataaacgacaaagcttggtcgttctttgattcggaaatagcttgatttgatcgatacctttaaagggccatagaagaagtccagatcgaaataatcgttcatgcgattcggacctaaaagttggcgaacttctgaatggtatgtctctggttcgccgaaataagacagcacttgatcgatggtatgacaagcatgtccataaagataactactatttaatgagaattcttgtgtattttctggaatttcggggcgataatagtcatagtgcatttctacttcaagtaaatcccctagaacgccactttcaataactttttggacagtcagaaagtcagaatcgtagcggcgattttgataacattgaatcaacagtcctttttctgcagccaaagcaaaaagttcttgagcttgtgcatatgtttcagtaaaaggtttctctagcaatacattctttccgtgaagcaatgcatccttggcagtttcaaaatgcagatggttaggagtagtcacaacgactaattgaatcgctggatcatcatagatatcgttgatatctgttgtgtaggtcgttccaggaagttttgcccaagtatcgcgaatcactcgggaatagattgtttttacgtggattttgtcggataatttagtagcaaacggcaagtgatagcgattagtgctttttccattgccaatataagcaattgttagcatagtttaaagcccccatttttcatgatagttccattatagtcaaacaaacgatcagatggaagcaagaatccttctcgctgtctatttgtatgtctccttaattaactaatgaaacaaagcgcttatcattttgaaacgaataggctatgattgattcaaaaaggagaaaacgatgagatgtcctttttgtcagatcgcagccagacagcttcctgcaacaatcatttatgaaaatcaatggacaatggcgattcttcctaaaaatcccgctgcagacggtcacctcttagttataccgaaacaacatgtaacttctattcttgcttgtgacgaagaaatatggatgcaagttaccaagacagcaaaaaaggtggcaacagattgcgtgaaatctggtaactttgaaggtatcaatttcttaagtgcccatggcgctgctgcccaacaatccgtcaatcatctgcatatccatttgattcctcgaaaagaaggcgacggcatcaatgcttggcccgattttcatgacagtaaaaagtaagaaggttattaacgagtcgtcaattgaacaatgaaagagagaatgatcaatggatattcagttagaaaaagttacctaccaaacattaccgatagcgtatcggatacaaaaagaaagttttaaacagttgtttgaacactatcaggatacagaaacctccccttatctggaaacgtatgagaatttctctaaaaagtaccaacgagagaataattatttctatttgatccaagccgacggatcagcagtaggttttgtacgaatcgttctatcagaagccccggcgctggtagctcgagtggcccccatctgtattttgcctgctaatgaaaatcatgggattggtaaaatggccattcagttagtcgaagctaaattctcgtctattaagacatggcagctaagtacgattttgcaagaaacccgcctactttcattttatcaaacactcggttatcagctatcagatcgtacgagtccgattgtgactggtatggatcgtgtatttcttaccaaacatatccactaaaactcattacttattatcttttctccccattacctatgacagagtctcttaaagagcgactgtcataggtaatcttgtttacataatattatactggtaaataaaaaacacttcttgtttccttgatacttttcgagagaaagttcaaacgagtttgacgaaaaggtctcatacaagcgttttttggacccactcattcgtttttctcaactagcttttatcagtttctttccttatttatgcaatttatttcctagttccttttcatcatctttctataatgttgctgatcttatgttataattaattatgtattttaaaactagataattactataagagaaggtggatttatggaacaacatcaaccatcctggataaaactgctttttttctttttgattcttatgggagcagatcttatgaaacaggttatcgttcatcatttcgcttggttagacgtgctgcaattaatgaatttcctaatatttattctactctcctttttcattcgccagttaccttctaccttgcgaaagattctgattggtacttatctttttattatcggtggaatcatgtctcttttatttggaaatccctttgaacttgcttcatggacactctacttcgtgggtgcgttttttggtacatttttgtgggatcatttttgtcaacgatttagacttcgttggtttattgataaaataattcgttaaaggagcgaatttcgatggattggcgcaatgatcggatcaaagcttgtcaaaatggaacaaatcccatgttaatgaaggaattatcgggtggttttgcggtttttggcgatacccaatttttaccaggctactgtgtgttgttacctaaaaaatcagtcggaagcctaaatgatttatcactggaagaaagacaagaatttctcgtctcgatgagtgttctgggtgatgccattttagccgcctgttcaccactgcgagtcaattacgatattcttggcaacacggatcaatttcttcatgcacacgtttttccacgatattcttgggagaccgaagagcgtcgttcaaaacctgtttggctatatccagcaacatattggacatgtccgcagaatacctatgatgaagagaaacatcacctcatacgtcagcgaatcacgacttctttgactgaatccgttcccggtgatcaatgagagctcttgaccaggagctttttttgttgataaaagaatttttcacaactctgatagaaaacagttgagacgtccgtataatagacaaagaggtgaaaaaatgaacgatcatcaaatgattcatttgatcaagaacaaagattataccggcttggaacaactaattgatagatacgggtcaagtattcttatgaccatccatcgaatcttacaagcccctcctgaacaaagtgaatggtcagatgtagcaaatgaagtattttatgaaatctggcaaaaaatcgaggcctatgatcctgagaaaagtagttttatcacttggatcttgctgattactcgaagtcgcggaatcgatcgcaagcgtaagttaaataaagcatttcaacaagaaagtattgaagaatatcaagagctagctattacggaatccccgttaagtgaagaagaatttctgatttggctcgaagagttatcccaagtcgatcaacaaatttttcttttatattatttttatcaagaaagtccagaagagatcgcgcaacaactggatttgcagacaacagctatttataatcacttatctcgcggcagaaaattgttgaaaaagatttggaaagaaaggatgaatcgtgatgaattttaaacagatcgttgattcagaaaatcgtcgtctcagaaatgaagtaacgcaagatgaaaaaaatcgtcttttagctaatggcaaaacatatatcttttttcaagaattgatgactgaaattcaatcactcttagataaagacgaaacagttcaaggctatctccctctctcaacttcaggcaaccttgcaatcagtaatcaagggatagctggtttgtcttatgcacgtacagaaagagcaaagcaatatgtcgtacagttcaatgatactcggagtaatcgtctatttgttttttcagaaaaacggatcctttttcttgtgatcatcgactttttagatgatcaaacctatttcagttacccctactcctcgattccggcattttctttgaagacgcgtaaactgaatcgctttgagaaaccagaagacgaggaaatcatgttttgggcttactttgattttcaatcggatagccatatttttagtgatgtattgacaaagaaagactatcaactgtttcaacatttccatgacacgattcctgcactcaaaaaaattccaatcactgaaaaaatccaccgtaaaaatcccttagattacataatcagtaattggcatttcaattatcgattgatgatattcgtcaatcttttactaattcttttagctattgggttagtcttggggatcgtctttggaatcgggatttttaaagactggtactatcgtgatttgattgggtttgttgatcagagatcattttttgtccgataattatgttataatagtcaaaaattaacgagagaaggtctacctgttttatgaaaagaaaggtactagtcccattgctgctatccttgctattaagcggctgttctgcaaacgtaccagaagaagcaaccacatcttcgagcagccaaaaacaaatgcctagcgaaaccgtagaatcatcgcaatcttctctttcagatacaaaaactgttacgagggcttctgctagcgggtctaccagtgaatcggtatcagagacggagtcaccaaagactccagaaacagcaagcgcatatccctatcaagtagatatgtcacaacaatccaatgtcctgacagtttcttttgaaggattcaacgttcctgacactgttactattgatcagagcaaagaggaagttacttttgaaagttctacacccgatgattccgtgactagccgctaccgagcaacaatcgcaacggttcccacaaaaacaattcgcgtttttagtgtaggaacgaatcaaattcgtgaagtcaaagtgaatacacaaatctcaatcggtaaaatactgggtggaacccaagatcgtaaagactaccatggtacaatgtatttgttttacaaccatgatggtgggctttccctagcaacgccgaactatgctggcaacgttcctgcagatcagatggatgtcatgcaggaagttcttccctaaatcacttcataagaacctaactttcagaaccttagcttgactacaatattgcaggaataatcaaaaatttgttgtggaggaaaatcgatgaatctcaaacgttttgtacaattgtttatttgctatttcgtatctatggtggttgctgttttactgaccaacttattcaatatttcaactatgccattttatttgttggtggcctctattattgggtatatcacattaacgatcccgttagtagtcatgacgatcaagaaaaacaaatagttccgagagtggatttattgaaaggagcatcagatgattggcaatgttcgttatctaccaagaaagttaagaaaatggtacattctctatcttatctgtctgatacttatttatggctggttgttgtttactgatcagtcagcggtacttgctgtcgctattcttctcgttctttttgcaatcgaacttgcatttatgtggcattcagaaaattcttttttaggcagtgttctggttgcttgtcttctttatggcatctggatgctacctttcgtgcttcggtgattagttttcatttattcgtatcgaaagtgaatcggagaagctagcatagagaattttcttaaaaaaatacccagagaaaagagcaagtcatgacgttgtcattgacgataggtctttgcagtaatgcaaacactgagggctctattcctttgggtattttttgttcaatttaactaatttaacttagtgagtgacaaacaattattgctctcgttcaacaagtcggtaatagacttttgctgtgataagatataccaacagataaatgactgcgaaaagagcaactgatacaacagtcacactgatcagcagattgcggtcggtcaacccgaaaagcaaaagcagcttgcgaattatcggaaacgcgaatgcaaggtggatgatcgcagctaccaatggaaaagaaaaaatcatcaatacttgttgttggatcacttgcttgacttctttatgacttaagccaactttctgtaagatctcaaaacgttctttatcttctattccttcagagacttgcttgtaatagatgattaatgtagctgccaaaataaagatcagtccaaaaatcaaccctaagaaaaagaatcctcccgtaaacgttttggtctgtacttggaagagatcttttgattcaatgcgtgcattcggatcagctgcttgaaggtcctttcgtatctctttgaccattgtttctcgatcactggtttcaggcacttggaagtcaaaaacagtagtgatcactggttgttgatagataaggaattctttttcctgataccaactagttaatttctcagaaagccaagtatcatcgactaccaccacaagttgttgaacgggattctccacttgagtaaaaggtggcagctcagttagtgatcgaagagtgaactgactatgatcgatcgtcagctctttaggcaacgcttgatgggtccaagtttctggaaagaccaacaattcatctttttctggtccttcttttcctgtgattctttggtactccgtactagtaacaaatgtgagaaagaccgctttttctaaattctcgctgttatcttcaaaagttgttgaaggagtaagtgtgtttccctcaaccgtaaaaagtaagtctttagtagcagtgacttgtttccggtttttgagcgttactttattttcaagactatcgatggcttggttcaattgttgcagattcgcctctgactcgatctgaaagtcataaggaaatcgtgtttccaccacattcttctgtccgaaataaagactagctgttgtggcaacagtcactaaaaccattgttgacaaaatacaaatacttgctagacctgctgcattttgtttcattcgataaagcatcgttgatacattgatgaaatgggtcgtctgataataataagtggatcgctttcttaaaaactgcaatgctttaatactgccagaaataaacaacagatacgtggcgatgatcacaagaatcacagcgacaaaaaagagtgctaaggcgctgatgggcgacttgattgtgacagaaatcgtataccctaccgctaaacaaatgatccctagaagggctaaaaagccttttgctcgcggctcttgttcattgcgcttactaccttgcagcagttcgatcggcttggttcgccggacttgcagcatattgaatagaaaaaggcagccataaaccatcaaaaagtaaaggatcacaagaccgatactttctacagaaagttcaaagacgaaagattctcccacctctagaattctttttaaaatcaagaaccccaatcgtgcaaacaaaagacctccaactagccctgcggccagactgatgaggcagctataaaaaagttcccaaaagaccactaacgcaatttctcgtttccctaatcctagaacattgtaaagtccaaattctttttttcgttgtttgatcaaaaagttattggtgtaaaacgaaaaaatggcggcaaaaatcattaaaatgatatttcctagtcgaaacataaaaatagcactttgactgcttggcagtttattcattcctggattatttacaatgatttgtgtcatcattatcactgcaactagaagactcatggacagtaaaaaaggagtataagctttggtgttttttcgcaaattggaaaaggcgattttttgaaagaacattccttactcctcccttgcaaagacagctgtcatggtttccgagattgcttctagaaaagcgctattcgttcgttctccgcgataaagctgatggaagacgtgaccgtctttgatgaataatactcgttgcgcgcggcttgcagcaatggaactatgagtaaccatgatgatcgtttgtccattctgattgatttgctgaaacaacgtcagcaattgatcggaagtttttgaatctagcgccccagttggttcatctgctagtaagagatccggctttgtgataatcgcgcgtgcgacagctacccgttgtttctggccgccggataattcatagggatagtgttgtaacaagtcggtaattcccagtgttcgcactaatggttgcagtcgttggtccatttgtttgaccggcactttcgataagactaatggtaataagatattgtctttgacagaaaaagtatccaataaattgaaatcttgaaaaacaaagcccaaatgatctcggcgaaaacttgcagcgtctttttctttgatggtcgtcaaatcgataccattaagcgctaattctcccgctgtcggttgatctaacgtggccatcaagttcagtagggtgctttttccagatcctgattctcccataatggcgacatattcgccttcttctactgaaaacgtgatattcttcaatgcttcgaccggctggccgttcaactgactttgatacactttttttacttgttgaatgtttaatagtggcattgttctctcccccttcttttttagcataagctgtttagaagaaaaaagcgacttacaataaaaaacgcaaacttacagtgttgaaagtttgcggtcaaataaaatttttagtgggaaaatggatcgtcaccgtagttcccttccctacttcggagtcaatcgttagctgacagccgattttttctgctgcttgctggctcaaatataatcctaatccgctagcacgctgctgaaagcgtccattttgtcctgtataacctttttcaaaaacccgcggcaaatcttcttgacgaataccgatccctgtgtcttgaatcaaaagacaattgttttcggtaaaaatccggattccgcctttttctgtatacttcaggctattaaaaagcaactgctcaaagataaaagtcagccatttacgatccgaagtaacggtcaagtcgatagccaaatccagttgcaagtctttttttgaaaaaaacaaggcatattttttgattgcttggtgaatgagaggtgctaacacaatcggttcaaaaacaaagtcatcatttttcaagttttgtcgtaaataattcagcatcatttgcaaataatcattcactttaaatagttctgctttgacttcagtgggcgataggccatcactttgcactagcaaatccatcgctgctaatggtgttttgatctgatgcagccataatccgaagtcttcgtagatttcttcattcttcaaggctgcttgatactcggaggcggttttttctttagcttgtcgtttgattagctgctggtattcttcttcgatactgtttcgcgcaatcggcaagaaagccaaagctgcttcagtgatcattttcttggctaataagttttgtaactgacgtcttttttgtagataacgcatatattgccagacagagaaaatacctaaaatcactcctgtgaaaatcacataatcgatgaagggctctaaaggaagctcatggagaaagaacaagcctaaaagaccgctactaaacaaaattaaaaacaaatagaacttgccgtaaagcaaaaaatactcttttaagttaatcataggcttgttccttttcaatcaaatagcctttgtttttcactgtttgaatcaaatcagacaatccagtttgacttaatttctttcgcaagcgggtcatgttaacggctaatgtattattatcaataaactcttcgctattccaaagcatttcaataatcgtttctttgggaacgattttcccttgctgttgcaagagtaaggaaaggattcgagattcgtttggcgacagcggcaaagattccgttttacttttcagcaaattttctattggatgaaaagtgacatctcctaatgaaaacgtctggacttgttgatgggtatattggtagctgcggcgcaacagcgcttggatcttagccaaaacaaacgccaaatcaaaaggttttgttaggtaatcatcggctcccatgttcattgccatgatttgattcatttgttgatccattgaagaaagaaaaatgattggcacttcagaaatgttacgaatttcttggcaccaatggtacccgttgtaataaggcaaagaaatgtccaaaagaatcaagtcgggacttaccgcacgaaattcctgcaaaatttcagcaaattttttggcgggataacactcatatccccattgtcttaaataatcagccagtactgaaacgatcgtagcatcatcttctacaaggtatattttttgcatgattctctcctatcactaaattggtgaagctatcacagacagtgtaccagaaaataaaaagaaacgtctagttgagataaatcattctagacgtttctttttatttacactttttcattcgactcactttttttaagtgcattgcggattgatgggacttgcttgattttcattagatctaataagaaagtaaatagtgggatccccacgatcagaccccagataccaaagagatgctcacccagatataaaacaatgaacgtatagaacatgggaatctctgttttatgggacatcagccgcggattgagaacataggactcgagagcatgaacaaaaataatgattaataaaacatagacaacatcattgagtccgccaatcgtataggcaataaaggttaatggaatacaagaaatgatgactcctgctactggaatcaagcttaagaagaaaatcatcatggccaaacttaacagctgaggaaagcccatgacagctaaagcaagcactgtgatcactgtattaacgatagcaatcaatagctgggtttcgatcacacttccgaatgcgcgggtaaatttccttgcgagatagtaaacatcctcaaaaaaccaggaagcactcccttgcaaaaagagctgagaaaatgccactgtttttttgttgtcaatcataaagaaaaaactcaataagaaagagatcaatacagtcaaagccaattcaccgaagttgtaaagataattgatgacgacgacgactccattttggattttttggacataatcgcttgtttgcaccaaatgtagcaaatactctaataactcattgttagagtctgctttttgataaaaatcggtcactgacttaaccagttgcgcggattggttcaaaagaatcggtgcatacttggtaatgactaagtaaaccaaagcgacaacgatcaagtacaacacgattgaaagaagtttgattgacacattcactttcttgcgtattagctggaccagtttgtaaatcaaataagtaaaaataaaggttaataaaataatagtcatcatactgcgaagcagaaataagatcccgcaaagaaagatcagcactgtccaacgtcttaatggaacattggcaacaaaccgatggtagtaattcatgaacacgctccttttttcaagtcgtcaatcaacgactgttacttcattccccaattaatctaaccactttttgaagcaattatcaactcaaatcaattaagaagactattgtgggtagagtcatatgctaaagcaaaagcagcctgctgtcagtggcaactggaccaagtatcgtgaatgaaggactgatgattattttcaaaagataaatgcctattttttcgaaaagtttatggttgttttaaggttactatgacacaatagaccttgacagaataatttacagtctgtcttagcggaaactaaggcagacgccttttttatcaaaaactgccctttgttcggtttgtatcgaacaaagggcagtttaaacgattctatatttattcttatcagttgttactcctagacgaattgtctgctttccttaaaaggacgctcactatgcgactagctcactatgactaaagagacaattcttgacgaacttctcgaagaatggcatcaacggtcaacccattttcttgtagcaactcatttgcttgataacggtcatgaaaggctttatctaaaccaaaattgacaattttgatcggagattttcctaaataactagcgacagcttgtccatagcctccttcaagaaggccatcttcaagagtgagcaacaattgatgtgtagcaattaagccagacaatgtgtcagtatctaatccagaaataaatctaggattaatgaccgtaggtgtgatcccaagctcggtttctatcatggcagctgctttttttgccaggccaagagcatttcctacaccaagtaaggcaactttgctgcccgcttgaatgagttgatttttgtttagttgactgtaatctgtttgatcgacacgacctgattctaacggaccgacaggaacgcgaattgccactgggtgttgggattggtcaatagaccaatccagcatcgctaaatattcttccttattggtcggtgcaagataaacaagattcggaatatgactcaaaaatggaatatcaaagatccctaaatgactttcatcattcatgccataagctgaagcgccataaactaaaatagttcccgccacattgttcaaagacaaatcatgagagatttggtcaaaacttcgttgcataaaggttgaaaaaactgcccaaacgggttttgctccattttttgccagaccggcagtcatggttgcagcatgttcctctgcgatcccaacgtcaacaaattgactgccggcgatttttcgttgttcaggggtaaaaaggatcatcggcgtgccagcatttactgcaacgactgttggatcctgtgccattttttctaaaagataatcggtcgttaccgttgaataagtttctccaccagaatttgcaagataattccctgtttcaagactaaatggtccaccagcatggaatttctcgcgattttcttcggcaaatttgaagccttttcctttaacggtctgaatatgaaggacaacaggatgattgctgtctttcacttgtttgaatagatgcatcaaggctgtcagatcattgccatcagcaagataatagtagtcagaccctaatgacttaaagaaattgttttccgcttgaccattcgtatctcgcaatgctcgtaagttattgtagagacctccgtggttttccgcaatcgactggtcgttatcatttacaatcacgatagtgtttgttccagtctccgcgatattgttcaatccttcataagccagaccaccagataatgagccgtcaccaatgaccgcaattacgttcccttcttcattttttaagtctcgtgctttggcaaccccatttgctaaagacaatgacgtggatgtatgccccactgtaaacaagtcatggtcactttcttttggattggtataaccagagacatcgctataatgcgctggatcccagaaggcttgacctcgcccagtcagcattttatgaatataggtttggtgagaaacatcaaaaatcattttatctcttggagaatcaaagacagcgtgtaaagcaaccgtcatttcgacaacgcccaaattcggtccgttatgtcctccatgatggctgattttttctaataacacggttcttgcttcctcactaacttgttgtagttctgcaacggataacttctttaaatctgctggatctgtaattgattttaataacatcaaaaaactcccttctctgtttgagagtatactgcttcaccttcactttaagtcaagaaacttttgaaactttttcacgaaagtaagcaacagacaggtagaacacatgaacacaaaaaagcccacccttcaacttgtcatggtgatctgttttatcagcagaaaagttgaaggagagactctttcaaaagcattcgttatgagacacgatcgttttccagcgttaaatgatgtaagtcaaatcacttgcaggagttggataagcaaagatcagcgcttcaatttcttggtgagtgagctgtttttccagaatcaagtagcacaaattaatcaattcatctgcgatacttgaaagacaggtaatcgcaatgatttgtccctcttgattgtaaacaagtttaagcatcgcaacaggatcgttgatgcgacggtacgtaaaccaatcggcaaggttgattgtttcactatggatctgcagattttgagcgagctgtttttcactttgaccgatccgagccaatttcaacccaccaaagacgattgtaggaatcaggggatacgtgattgcagaacgagaacctttttggctcattgaagcgaccgcatattttgcttcaaaacttgaaacaggcgtcagtttaggttgttccttatccaatacatctccacaggcaaaaactcgtgggttcgatgtttgtaaatagtcattgactttgatcccgcgtttggaataatcaactcctgcattttctaagtgtaaggattcaacatttgggatgcgtccagcagcacttaccacgtaatcggtgtccagctcaaagcctgtaccttgcagcgtgtatccttcattgatttggctgatgctttcaatctctacattgaaatgaaaggaaattccttgcttttgtaattgctcaacaaaggcattcaccaattcttgatcaaatgctttcagtggtctgtcgttatgatgaataatgtgtacctctgctcctgctgcttgagcgattgtcgcaagttcaaaagcaacataccccgctcctaaaaaagtgattttcgcgggcattttttccattgcaagaaaatcggtgcttgtatgcaaatattcttgtcctttaatcgggagtagcgcaggtcgttgtcctgtagcaatcaagaactgatcagctgaaacgatttctgaaccaatccgcagcgtttgttcatcgataaatcccgcttctccttcataggtcgtgattccagtatccactaagccctgcttcgtctgtgtgggaacagtgtccgtgtaactgcgcttgaaagccatcaaagttttccagtcaatacccagctctccagtgatcccttttcctgctaagtgagcagccttcgcctttgcttcaacggcactcattaaaatcttcttggggtcgcacccgcggttggggcaagttcctccccagagatcggcttcaacgattgcgacagtcttcccttgctcgctgaaagaataagccgcagcagttccggatggtccaccacccacaacgattacatcatagttttgcatcttgctcctcctgacttagaaaatgaaagatatctgtacggctaacttcaccaatcgcttgtccttgttctgtaacaaccaaatgttcgtggttggccaagacttcatatacttgtgaaagagggactttcacatcgagggacattccctcttgtgtagttgattgttggtagtaaccagaatcaataatcgcttgaagacgttgttcttgctgtgctccttgtgtttcgtcaaaaaaggcgcgaacgaaatccgtttttggctctgtccgtattttttcaggcgtatcacattgtaccagtctgccttcattcatcacaccgattcgatctcccaattttaaggcttcattcatattatgggtaacaaagacgatcgtattgcctaatttattatgcaaatctaatacgagatcctgaagattggttcgagaaatcggatcaagggcgctaaaaggttcatccatcaagatgatgtccggttctgcagccaacgctcgcaagattccgatccgctgactttgaccacctgaaagttcagccggcatccgttttttgaacgtctctggttcaagtccaacctcagtgagtagttcatcgacacgttgattgcgacgatttttatcccaaccgagcatttctggaatgatttcaatattctccttgacggacatcgttggaaataaagcaatttgctgcaacacgtaaccaattttccaacgtaacttttggagttgatagtctttcactcgtttttgtttgaagtaaacattgccttccgtcggttcgatcagcccattgatcattttaagggaggttgtttttccgcttcctgagggacctactaagacaaagatttctccttgatgaatggagagatccaattcttttaatacgacttgtccctcaaattctttgacaacttgtttaaattcgataattggttccatttagtttccctccccaataatcttttctttttttagaaattcacgagcaacatctgccggttgttttccttccacattcacttgatagttcatgtcaatcatctggtcctctgtgatttttcctgatagttttttcaatgctttgacgacttgcggatgttctgcagcaaattcatctttcatcaatgcggctccttgataaggtggaaagagctgtcgatcatcttctaaaacgacgagattgtattgtttgatctcactatctgtcgaataagcatcgatcacatcgacatccttgctttgaatcgcttgatagcgcagtgccggttccatactttggacagaatcaaaagtcagcccgtactgtttttggatcccgcgatagccatcttcccgatcaataaactctaaagtaaaaccagcccgaagctctgactcatgagcaactaattcagaaatcttcgttatacccaactcttctgcttgttcacgacgcatggctaaagcataggtgttttcgtaggtcatcggctctaacaggcgcatattaaactggtcactaagcagttttgttgcttcttgataagttgattctggagaaccatctatttgggtattttctgggactttgactagactttctaatactgttcccgtaaactcgggataaatatcaatctggtcattttcaagggcgctaaataagaaacttgttttaccaaagtttggtttgatctcgacggttaaactaggatcttcttcttcgatcactgcttgatacatattgataaggatatctggttctgaaccgagtttaccagcaatcgttaccgttttatttgaaataggattatactgtgcgaaaagaattccgccgattccaagaaagataacacctaaagagatcagtgtggttttcatactgcggttttgtaaaaaacgaatcagtccactgaataagattgctaatagagccgaactaaccgcccctatgagtgtcaaactcggatcattacggtcgatccctaacaaaataaaggttcccaatccaccagcaccaatcaatgctgccaacgtggccgttccaatgatcaacaccaatgctgtacgtaccccagaaatgatgacaggcattgcaataggtaactcaactttgaagagttttcgcaagcgagacataccaaatgcatccgccgcttcttcaatcgacggatcgatttcggaaagcccaatatacgtgttttgaaaaatgggcagtaacgcataaactaccaatgctattagagcgggaacggtgccaataccaacaaaaggaatcaataatcccaataatgccaatgatggaattgtttgtagaatacttgtgatctgtaaaacaaattctgccattcgtttcttttggctcaacaaaattgctaatggaatagcaattaaaatggctaaaatcaacgcactcagcgaaatggccaagtgttgaaagattgcccgcagcaactcctcctttcgctcgctaaacgcttgaatgatttcgttcatatattccatcctccactattctagtctgccttaagtatagctgaatgcccaaacgcaacaaaaagatacgctcagcaggattgggagaaaagttggcctttcgcatctaaataggatccattatttcctgacattctgttacaataagtctaaaagaatgaggtgcttctatgccattactggttttgattggtgctcaggctgttggaaaaatgactgtcggtcgcgaactttaaaaaagaattgatggtaaattactatttaatcatcaaactattgatttatttgccaattatcttgggtatacgcctgcggcatttaagttgtctgattccactaggatcgaacttttcaaagcatttgtggctggtgaacagaatacagttaagacaatcatatttactgttttagtgggatttgatcagaaagaagatattgcttttttacacaaaatttgtgagatctttttaagcgctggacaaccggtttattttgttgaacttgttgcgcaattagaggagcgcatcgcacgtaaccgtcaggaagcacgtttaaaagcgaagccgtcaaaacgggatcttgctttttcgcatcaagaacttcttacttttaatgaaaaataccgtttggaaagccattcgacggaattggcatccctttttccaaaagtaaaaacgatgaaaatcgataatactgagttgtcacccgaaatggtcagccagaaaattattgctaacttccaacttgaatgaaagataagaaggacactaatcttaggaaagcagattagtgtccttctttattcttattttagtcaaacatccgatgtcgctgtgaaaaaaccatcagcaaaagaaaagacttccccaagcacttctattactgatggttattaaaattcacgttgcctttttatgataagcgacgtgtattgacactaccaaatctattttttcattccttcatgaatattatgactatcgtataaaaatgaataatcagctgattcgagtttccttctataaaatcatctttctacctgatatcctatcacttagggaaaaaatagtataatcactttttgcactggaacatgaaaaaaagaaattaaagactttaccacttttttattctcagtacttgaaaagctactccatctaactgatcaatcaatcatactaactcctgtcaccggtacaagcatttctaagttgattgaccatgatcatggtcaatcaagtctgtcaatccgcatatatctatattagtactactgattatttatctttttatagagacttatagccctttcaatgctgcgctgcttatttggcgattgaaacgttatgtgatttttttagttgaacataagcaatattcaaaataaagccgacgactgccaaagcaattgctgtatagaatgcgtttgtaaaatctccattgttgctggcagccattcctgctgctactcgtggtccaaagaaagcagctgtagaataaccaacaaagacgattccatagttgactccttggttagctggtccgtaattttccattacgatcgatgggaaaacccccatcactccgccaaagcagagtcctagcccaatgattcccactgcaaagatcatcgctgcacttgaaagtgtcaaaacgagtaaagataacgctacgacaccgtaaatgatcatcaatgtattggaacgcccaatcttatcagaaactgttccccaaatcactcgacctaagcaattgctaaaagaatatagactaacataaaaagcggctgttgtagctgttaatccgaacatttcctgcccaatcacagcagcattggaagcaatcatcaaaccagaaaatgccccaacaccgagcatcaagataatcaaataaaaagcaggtgttttcatcatctcttgccaggaataatttgctgcggttcctttaaccgcagaagtttgtgggacccatcctgctggacgataatctgcaggggcttttttgataaagaaacttgccattacaacgacgatcatataagcaataccgataaaacgaaaagcagtcaacacatctcttgattcaataattgcattcgcgatcggtgcggcgatgatggctgcaccgcccatacctgcagtgatcaatcctgaagcaagtccacgtttgtctgggaataaacgaatcgtattacttaagcaagcagaataagcaaatccttgaccaagacctgaaagcacaccataagttagatagagcatcccaggtgattccacaaatccagttaagaagaaacctagcgcaaataataaaccaccaaaagtaatcgtccattttgccaatccacggtcggtcaagaatcctcctaaaatcattgtgataggtccgacagcagcattgattgtaaatgccagcatgatttcttccattgtccaattttttagttgactaagcggtccagcgaaaacgctaaatgcataaacggcacctgtacataacagaacagcagttgaagcaatcaagactagccaacggttgagttttgtttccatgttttacccccaaaaaatagttttgtttaaataaattgaatgaatacacctcatgttacttatttcacataacgttttgaaagaaaatgtgcagtgcgattctctgcacatttcttttaacctattaaagattttctgcaactgctgtcttaccagcgatccgtccaaaggtaaagatatcagtcaatgagttaccaccaaggcgatttcctgcatggattcctcctgctacttcaccagctgcatatagacctttgatcacttgattttcttttgataacacatgggtttgtgtatcgatctttaacccccccatggtgtgatgtactgccggttttcttggagttgcataaaatggagcagtcgttactttaagatcaaacacatctttgccaaattcaggatcttttcctgcatcgacataggcgttgtatgcagtgatcgtttctttcaagatggttggatcaacattaatttgttctgctaattcttcaagggtatcggcgcggaataatgttccgttagctacttgtttgtcgattttttcttgggacgtattgtacgctgttttcttgatttcttcatcagcaatcaaatagaataggccaccattatcgattgctgcttgtgtcaatacatcacggctttcatattcattgacgaaacgtttgccttcttgattgaccatcacaaagtttgcgggaggtacttgcagaccgctgaataatgctcccgtattcggatcagataccggcatcatttgtgagaagcccattccaactagatccgcaccggcactttcccctagtttgataccatcccctgtgattgccggcgaattggaagttttgatgtcatcttcgatttcagtccaatacgtgttgtactgcttcagcatttgtgtattcgcaccgaagccaccagaagctaagataactgctttggcatggatcgttactttttgtccattgcgaccttccccaatgatccctacgacttgtccctcttcgatgatcaattctttgactggtgtgtcagtaagaatttttccaccattttcattgacgaaattgtgtagggcagaaacaaaagcgtacccttcatttttcaatggtttatggcctcggcgccattttgctccaactggcatatcgacatgtttgtaatcaaattcaacgccgatttcttctagccatttcacagactctagtgcacgatcagttaggatttttactaagtcatattgaccgtaaatcacatttccttctaagtcggtccgtttgccgcctaaataagtttggatacgatgccagatggcagagtcaaataagaattctttttctggagtcgttgcttgtaaatacgttgtgatttgttctttcaacaatcgaaaatcagccaagtattctgcatcaatggttgcttcatctacggcaatgatttcttctagcgcagcccgttcacctggaagcgcagcaaatgttttttgccaatccggatctgcggcattcattggtccacccgtgcgaacggtattcccaccgatggctgggtatttttcaactaaaatcacctctttgccttcttggaggatacttgctgcggcactcaatcctgccccaccaccaccgacaacgatgatatccgtggtgtaagtttcatcttccgtttttagcgcactggctgccttaggacgttttcttaaaacatctgggtttgcaccagccattttcactgctttcgcgacaccatcaacgacaccgttactggtaacggaagcacctgagatcgcatcgacgttcaatgtttggccttcaatgatttcttgtggaacacgcgcaaagactacatctgcgattccttccgattcaccggaagtatcgatattgattgcttcgatccgttcttcacttaatgtaaccaccattggtaaatcaccattgtgtcctggtgccgtgacagtataatccccaggctgataaactacttcttcgggaacattcaagatattagcaacttctgtaaagcgaatgaattttctgaaacagctttccaaaaagtcaacagtccgttgatctttcagctgcccattttcatcgaatgcttgatgcgcacgacctaaaagaaattcattaccaggcataaccgttgcattgacaccaggtgcatcaagaatttgacgcaagtgtagttgtgcccgtgaagaaccttggacgtcataagaagcacccacgatcatcactggtttgccatcaaacgggtgtagattgaaggacaaccattctaagacactttttagtgcggatggaatggaatgattgtgttctggtgtcgcgataatcacgccatcggcagccaaaattttctgatttaatgtttgaatgacttcactattggtttgatcctctgtttcattgaacataggaacttgatcaatttctaaaatttcgatttctgctaaatcggcaaatgcttgttgcatatatgtcaccagttggcgattagtcgatttctttgcatttgtaccgatcataccgacaaatttcatggacatttcctctctttcttatacctgttcccaagaaaatttctttgagcgctctttggcagtcgaatattcactgacgagacgattcgtgatttccacgaataatttgaattcattgaagcagtcttctaattcagcgactttttcctcatcttttaagcatccttcttcatcaaaggcttgcatcgaatgaccgagtaaaaattcggcactaggcatgattcgtgctttgacttccggtgcatcaagaatttggcgaaggtgtgcttgcgctcgggaagaacctaaagcaccaagtgaggcaccagtgatcatcactggtttgtcgatcaagggacgggtcgtataagaaagccattcaatcatgctttttagtactgctggaatggaatgatcgtattcaggtgtactgataatcacgccatcagcagcctcgattttttctgctaattctcgaactgcttcaggtgctgttctgtcttctggttcattgaatgctggcagatctttgatttcgcaaagctcgatttctgcctgatctttgaaatgggtttggataaattgcaataactggcgattggtcgaacgtgcagagttagtgccaacgattccgatcagtttcatactcatctctcctaaatgtgataaatttaacaattgattcgattataactcgcttttagatcaattgtttcaaaagttaatcgtacaaatagtcgtcttagaaagataaaaatggtcaaactcagcttaaatctctctgatttcattccgatagaaggatctgaaggacaatttatttgttccaattaagtacttctacagtttagtctgaccattcacatttgtgaaatatttatttaattatattatgataacttttttgttataatagacatatttctacggaaggagcaacttctatgtctcttaaagattcccatttgatgctgcagtacatcgacacattactaaagtacaataactataccaaagcagcgaaagacctatttatttctcagccttatcttacgcaagccatcaaaaaagtcgaacaagagttgggaacggccatcattattcgtcagtcaggtgttttgcatttgactgaagccggtaaaatctattatcaataccttgaaacattggaaaccgcttccgcgaaatttcgtcatcggttactgcgctacacatcaccagaaaccaaaacattgcgattgggtatcttgcccagtctgggctcgttcttgctcccactttttttacctgactatttggcagaacaccaggatgtgaccgtttttttgcgtgaagatttgccaaagcacaatgagaaacgtttattaagtaatcaattggatttttttgttggccaaaacccggagactatttcacctaatttgacgacttacgccacaaagagtgaaaattattttgcgatcatcccccctatttcgcctttgtatcaagcaaacaaaaaatttctctctcaagacagtgtttcaatgaaagaactgttacaaagcccgttgatattgacgacaagcggctccgcgattcgtcggcaaattgatcaattattgaaaaagtacaaagttgaaccaaccattctcgtagaaagcagcaatatttatactgcagcagcacttgctgaaaacaatctcgggttggccatcgttcctgaaagtgtcttgcaagcagcgacaatgacgcctttcaacctttatccgatacctgaagaaatgctaacgttaaattattttatcgctcatcaagcagagcgtccgttatcgatagctgatcaaaacttgattcgctattttctagaaaaagtatgatcgctaaaaccgccatcaaaagtaaaaaaaacatactcaaagaagaaagagtcagaagtaatggtatgtcaaacgagctaaacagattaagcaggcactttaagatcgtgcaattgccagggggcgcagtcgttctgctatcttgtttcaccagtttaaatacttcattttacttcatttaccagactctgaaagctgctttgtcaaggcagtttcgtctctatctttgagtatgtttcaattaggctttttgattcgtttcaggtaactcaatcagtggttgtagcgtagagggataaagcaattggccttgtcgggttacgattaatccagtgatgccatcgagttggctgagttgtttcatgatttcttcagtttttttaccaaagagacgtgtggtccaaatttcgccatccactgaacgatcggaaataatcgtgatacttgctaacgctgattctatcggataaccggttttacgattgaaaatatgatgataggtcttaccgtcgacggtgtgggaacgttcatagatccctgaggttacgatagaacgatcgcggatttttaaggctgccacgaaatttcctcttggcaaaaaaggattctgaattccgatacgccataagtgatccgcatgatttggtgtttcaccaaaggtaacaacattcccgcccagatcaatcaaagcggcactgacaccagattgcttaaaaaaatctgccagctgatctgcgaaatagcctttggccacagcacctaggtctattgacataccggcagctaaggcaacgctctgctgttggttatccaattcgattcgttgaggatcggtcacctgtagtaattccgtcactttttcggcagtcggcactttggcatctgagaaaccaatacgccactcctgaaccaggggtcccatcgcgatgttcaagaaactatcctctggcaagctgtgctcttttgctaaggcgatcaaagcaaacaagtctttggctactttggtcggctgaattccggcgttttgattgactttcatcagatctgaagcaggatcattggcactaaaccgtttttcaaacgctctgatttgttggactgctgcttccaaaattggtgtgggatcttcatgttggatccaaagctgaatgatcgttcccatcgctttgacttgtctttttccttcttgcatccgttcgtttcgcccctagtttttttgttcatcatagcagtttttcagaaaaaattgaatgcctttagcaaataaatgcaactataagaaagtcgcggacaggctttaaaacattaaatcacccggttcaatgaaatcatttcgatcaatccttgcgccgcttctgaacctttattgcccgctttggttccggcccgctcgatggcttgttcgatagtttctgtagttagaacgccaaacatgactggaatgtctgccgctaatccaacttgggccacgcctttcgcgacttcattgctaacaagctcataatgggtagtcgcaccgcggataactgcacccagtgtgatcaagccatcgtattgcttcacgttgactaatttttttgttatatagggaatttcaaaggcaccgggtacccagtaaacatcaatgtcttcttcttttactccatgccgtatcaaattgtcttgggcgccactcaaaagtttcgccgtaataaactcgttaaaacgcgcaaccacgatccctactttcattccttgtccgtcaaatgttccttcaaattgtgtcatgttgtgctctccttctttctcaaagtgataataaatgatggaatttttctttttttgtttgaagataacgattattttctgcaactggagttatttctaacggaattctttcagcaacatgaatgccatgagcttctaactcggtgattttttctggattatttgtcagcaagcgaatcgtatcgatgccaagagacttcagaataatcgccgcaaaaccataatcccgttcatctggacgaaaacctaattcaacattggcttcatacgtatccaagcctttttcctgtaattgatacgcctgcagtttctgtttcaagccgatacctcggccttcctgacgcaaatacaagatggctccggtaccttctttttcgatttgacgcatggcttcatgtagttgttccccgcaatcgcaccgctgggatccgaaaacatctccggtcaagcattctgagtgaagacgaatcaataatggttttgcgggattagtcaaatccccttttgctaatactaagtgctcaagatgatgctgatcttcaaataaggttaaatcgaaggatccaaatgcggttggcaattgaacggttaactgacttgttgccatataagtcgctaactcttcgatagtgatcatcggcagctgccatttttccgcgaattgagccaattgtgggcggcgagccatcgtgccatcctcatttagaatctcacaaatataggccgcttcactttgattggtcaattttgctaaatccaatgcagcctcggtatggccccttctttccagcaccccgcctattcttccgatcaacgggaaaatatgacctggtttttgaaagtcctcttccttagtttgaggattagccaatgctcggatcgttcgcgcgcgttcttcagcagaaattcctgttgtcgttgaacggtgatcgacacttatagtgaaggctgttttgaaagtatccgtattttgcgcgaccatttcagttagctgcaagcggtcagctagttgagctgagataggtgcgcaaatcaaccctcgagcaaatttcgtcataaaattcacgctttccatcgtagctagattagcgatcccaacaaggtctccttccgcttcccggtcgtcatcatcagcaacaataattaattgcccatttcttaaatagtctaatgctgtttcgattttatttttactcataggacatttcctttcttccgccacggatcagttgattggctttgacatattttcctaatagatctgtttcaacattcactgcttcaccgcggttaagtcgccccagattggtttgatttttggaatgaggaatcagtccaacggagaaatagcgcagtgtggtctcgataatcgtcaaactaaccccattcaatgcgatagagccctgtggaatgatctcatttctcagttcgtcgggataagcaaatgtcagaatcagcgcattctccaacacacgcttttctagcagcgttgtcgtagtatctacatgacctgccaccaagtgtccttccaagcggccgttgaaagctaacgctcgttccaaattgacttcgtcattgatttttgcggtcgaaaaggtggttcgttgataagtttccggcatgatctcgacagtgaattcttgtttgccagtcttgatcgctgtcaaacatacgccattgatcgccatactatcgccaacccgataatccgttaacaatgcttcagaagcatgacaagtcaatgcaatggtgcgaccactaggcacgatccgtgtgatcttacccttttcttgaatgagtccggtaaacattttcctgcctccttccaacgatccttaactcttctccgaccggttcaacagtgacttccgttagcgcaaacatctgattcacttctcgagaactagcaaaactcgctgttccattgccgccgataagttttggcgaaagataggtgataacttgatcccaataaccatccgccagaaaggcatcatgaatgctgcttccgccttcaacataaaccgattgaatcttgcgtcgatacaattctttcatgacaaacgagagagtcagtgaaggcgtggtaatgatattcacgtgatttgagaaaacagattggacttttttcgtagtaaagaccagtacaggactactggtatcctcaaaaagagttagctgctgtttcaaggtttctcctttacgatctaggaccactcgataagtcggaaaggcagcctctgtccgcaaagtaggattatcgattaaggcagtgcggctccctatcaaaatagcctggtagtctgaacgttcctgacgaacccggcgcaatgcagcttcaccggttatccttgttcgctgaccagccaaagcgatttttccatcaagtgtggttgcttgctttaaagccacaaaaggacgttgctcttcgtgatacgtattatagtggcgattgatttcacgtacctccttttctaaaacaccggtgatcactgctactccttgtgattctaaaaacgctttgcccttgccagataccaacggattgggatccaattgaccaattaccacttttttgatgccgctttgtagaatagcagttgtacaaggtggctgttttccgtaatggtggcaaggctcaagggtcacataaatggttgaatcaattagtttttcgggggaactacatgaatcgatggcgttcttttccgcatgtggctggccataagccatgtggctgcctacagcaactatttcctcatctttcacaatgacagcaccgactaaagggttcgtgaaggtttgtcctttgccttttagtgcttcggatatggcgcgcttcatatacgtttcatgcataaacattcctcctttctttaaataaaaagacctcgtgcataagtacacgaggtcttgattagacaaactcaaagaaacgatgacaaaaagaatagactcctcccgtcaatattcttgtaagtttttcttctcccatccagactttaactgtcggttccagagtttcactggatcaaccgcacgaatgcgggtcacggacttcaagcattgcttgtcaccgtcggtcgggaattacaccctgccccgaagaaacatattcaattcacgttagatactactattttttaattcaggtgtcaaacccctcttctatcctttttaaataacaattaaggaaaatgtttaagtacaacattcgccgttatcggagaagactttaaaaagttttttaggaattagcgacctccaaacaaacaattaaatgaggttccctggataaattatttctctttttatattttatttatttcgattgaataacacgtttttcgaacagataaaaaaagacttttaaagagtttaagaaacaatctctttaaaagtcttgtgaatggaataaatatgttattttgctgtagtgaaataaagtttctgactcgttaagttttccaaagaaagcagaaagaaactggcagctaataaattggcacttccgccgggtgaaacattttgctgttgacaatagttgttcaatgcttcaaaagcggcgctaggaatgggctgtttattggcttgctccacaatgccgtcagaagtactaaagtattctttatctaacaagttttgattttgataaatgtttcctactacctctaatcggtttctagcactcatcaactctgtatcataaatatgcttccctttgattctatatgcaccgctatcgattctgtatacttgtacatagctgtgccagtaagtatcactgtaattaacggatgaacttgtatgcaaaagaacatccccctcaaaaatctccacgccgttcttgtctttcaagccagtggattgcatgaggaatgaatcaattgctggaaaagtatgatcttctggataatctccgcttacatcaagtatgtttataccgtcatcatctaactcaaaacaaacgccttctgtacttggataaatcattctgtcattttctttatcccacgctctaaattttggtaccatcttatccctcctgctccaaaggcattatttcaatttgtgtgaatgtatcctttttttcttcgatttctttcgccaacttcttcgcaagttttaaactctcgcaaacctttttcagttgaactctcccagaaaatggattctcaacataaactaaatacacaaaactattcttagacatcttatccctcctgtttgctatcgctgacgattgcggaaatttactactatcttttattatttaccgtcttgcaatactgtaagggttgctaactttccttaatgatataatttgattattaattaaaaaggagtctttttatggacaaagtaaaagaagtagtttcagtaatactaatatttgctttgatatattttttgttgtgtctcgtcgcatctctcataatcagtttttttagattagtttttaaaagagaacctttctttgtaaactttaaagaattgtttcttaacttgtttttagaaattttgaatccttttaattatctgttctgattaaagcatttcgtcggataactgacttggtaaaatataaaatatgttacaatacctaaaaggaggtattgctttgggaacttttttagcttttatttggtatatttttataggatttatgctttatggaatcatcagattggcagttaaacacggaatttccgattccaaaaaaaataatttatgattctgttgctactcttttagagtagtttttttatttccgcaatttttggtggataactgactaaaccagcgatccgtcaactgccaataatgtcggttcattgtcattaatacaatcaaaaacttgcacctctgcctcttcactaccgactggctcccctgtttgttcactcactgtattcgcaacttttgtaatggcaactgtcgtctcaagttctttcatactagctacaaagtcctctttatcttctacgtcacacactacttcttcataaaattccatacattttccctcatttcagctgctacaattgcaaaatatggctcattaatttcaaaaaatctcatttttcatcttcctttctagttgtgtatttctgtcgttactaaattttcatatctacaaacatttatagtatttatttattttgtttgtttattatggtactttatttaaaaggagtgattctatggcgaacaatattgaatttgaagttgaaaaagtttataaaggcagaaccaacgaaatctttgttattactgatcccgagacacaggtacaatatattcaaacaattgttatcggttctgacggaaaaggcgtcgcaattacaccaagactagagccagatggaagtattcattataaggattaattagatcaacttgtgttggtcttttttctttccaagttggtaatttcttccaattgctgactaacgaccgctaacgaatttcctcagactatgcagacctctgccacgtcttttcgatttccgatcaatccaagtaccagttgttccccaataatcaatcatgccttttggcgtattgatcgcaaattgatgattattggataatgggtaaactcaaaacccaaagacttgatattttttatcgctgaatcgcccatgcgcttaacatgctgctttctacgctctttcaggtaaggcttcgcatctttccagtattcagccatttctcccataaaataccttctttcttccgattacaaaccccttatttagccaaaatcatatttttcagcttaacaacagtttgatcaccaagaactttctgccgccactcgtcctgttctttgtgacagacaataattctcacatgtgccgatttctcataaattttcagacattccgctctaaccaattccgaaaatccttcgatggcacagttgtagatcttgccgacttttactttcgtttttgctggtctgaccttcggttgaatctcgaagcgacgtccttctggatgaataacaaaagagtcttgtaatctcatgatttttcctcataaaacttactttcgataaatagtccagtttttcggtcatatttagccaaaatcaattcgatttggtacctaaaacaaaatagtttagcttttattttaaaagcctcagtttgaactcctttaacatcaaccgcttggaccaatttgtttccatcccaaaatgtgaagtccggagtataagtgattgaacgtatggttttattccctaagcgaaatttgggttgaagctcgaatttttcttgtaatcgaagttcaataccattggtttccgcatatttagcagcgaatggaaggtatcgtgcttcagcaacactatcgaatttaatgccattgacaacagtttttcgattgctgtattttggtttcttggatagtttagttgctctcataccgccacaccctctcttgccatcagtcctcgatatagcaacttggcttcttgccacattgattcagtggttccggcagtgagaaactcgccatagtgcgtcttcgatacttttcccaagctgattcgagtgtgacgatacattaccatgaagattcgaaagcggacctcttctggctgatcgctgtcgaggattcgcttaacattttccatcaagttcttgtgactagagtctaatgcagcgtagatttgcttaattacagtgattcggtttaattgatcaatttccaaatggatcatcccccgcttcttttcgtagtcgttccatgatctcagcttccttttgagcgttgtattcttctggatcattaagccattcaggtataggttctgtgcgaattggcttcttagaatagctattttggttcttgtgccttacatcatctgctctaacatccgccatagttttgatatttttctttacccagctttgcataattcctttggcatatccgtatgacttctggtctatagcagaccgtctcatagcctcacaaaccatttcttcgccaatatcctcaacccaatgacgtagatcatcagcaactaatccgttaatcactccaaagacttcttgatagagctggaaaggattagcagcagccggagcgctctgcgcattctctgctgttgctggtgatgttgttggtgttgttgctggtgatgatgctggttgcgttatcgtatcgataccatatccataccctatcgatacggtattttcttttggtttcaaagtttggatagggtatttatattcttgacacttcttgatgacctcaatctcaaattcaagtgtttttatctcctttaattctttgtcgatgaccgctgcgactttaggagatctggcgctgttgtatttgagccagttgactatcatcaactcttccgacttttcattaaagacgattcggccttcgctaacgaggaagtcaatgtttgtttttatttcttctgcagtcatatctagttcaaacttcgcatatctcagattgaattcataaacaccacattgagttgtgtaatcattcgataagagatataggaaaaaaagtttttgatctttgctccattcaccgactcgtttgtctttccaaaaagtggtatggagttgtctataaatagccattctttaagcgactcctccttattccaataaatcgcctacttctaaaaatcctgttaaagacttatgttggcgacagtattcacatttcccgcacattttcggcgcttcttctccatttttcactcgtaagatatgaggtaattcttgttccaataatcgaagttcaaaatcaaagcgtccaggataaatactgataccagcaatatcaggaggcgactcttttgttactgcaaagatataaggtgtaatttccctgttataggtttgttcgagtaagtttttataaacagccatttgtagaatatagccatattgctcaacaaacgaaacgtagccactatatttttgtgaccagtatctctgagaaagactccgagtcgtttttaaatcaacaagataacctttctctaaattgaaacaatcaattctggctttccattccgtatcaaatagcgttcctgttagaatcagttctttctcgccttgatagacaaaacgaaaaaatcatcatattctaaggtttcaatcatattgatcgcctgagcaaactctgcccgttctgatccattctttttataaatagcacttgcattctcttgtataaattcttgatgtgcctcaggagacttaaaataagaatggacatagtttccaactagtaaagccgtaggatcactctctggcgaccattcttcttttaattttgccaaagtcgctgcttcgcattcttgaaatgttttgaattggctgactgacatatactgccagtcagcttcattgctataatagttcttcttgtttaagtccatcggtatccgtcaccttcgcttctttcaaaggatctttctttgtttgagaaaattcttgttctagtttcgacgattctttcttttcggcggtcggaacctcaaaccaatcttctactttactcatgccatgagtgttgctgattactttgattattggtttgaaaactacgttgaaaaaagctaaaatacaatactcagaaaaattatctaaacatcattaataaatacattaaaccagaaataggcaagtattacttgagctctatcggcccctctcgtcttcaagatttaatgaacaagttacccaatggatttgaccgccctcttgctaaacattccgtagaaattgtacttactgttttaaaaggagcatttaaaagagctgtctatccatggcaagcaatcaattcaaatcctatggtatacgttgaaatgccagccttcgaaaataaacccaaacaaacaagggatgacatgaaaattatcactatggatcagtatcaaaaaatacttgaatttaatcccccatccagtcctttcagattaccactcatgattggctttcatacaggattgcggagaggtgaagtatgtggtctacagtggtcagatatttctttggatgagcgaacaataacagtagatcgaataatgttacaggacaagcatggaattcagcttggcactcccaaaacacaagcaagtttcagaacaatagcaattgatgatgtattagcagctgaattaagaagagcaagaaagagtcaatcagagaataaacttaggtatggtaaattctattacgattcaacttttgtctgtacaaaagacaatggcgaaccagtgacaccaaattctattaaatggcactcttctcgaataaaaaaggaactcggaattgattttaattttcactctcttcgacatactcacgctaccatgcttttagaagatggagtcaagccaaaaattgttcaagaaagattgggccattcaaggattgctactaaaatggacaaatatgtccatgtaactagaaagatgaaaacagaagccgttgatatattcgcccaacgattgaaaaaatccgctgaaagataaaaaaattgtcacccatttaaatttatgggcgacaatcgggcgaatgtttttgaaaattcacaaagaaacaacaattgttttcaagaaccccttgctatttcttcggttcatcctcatccattttcagaacggccatgaaggcttcctgtggaacttctactgaaccgatttgtttcatgcgtttcttaccttctttttgtttctctaggagtttccgtttacgagaaacatccccaccataacatttcgctaaaacatttttgcgcagagccttgatatcggagcgagccacgattttttggccaatcgctgcttgtatcggtacttcgaattgttgacgcgggatgagttttttcaatttttctacgatggcttttccgcgttcgtaggcaaaatctcggtgaacaataaagcttaatgcatcgactttttcagcgttcaacaagatatccattttaactaacttgctggtacggtaaccggacatttcataatccagtgatgcataaccttttgtgctggatttcagtttgtcaaagaaatcaaagacgatttcagataatggaatttcatagacgacattgacccgataatcatctaggtagtccatggtgacaaaatctccccgcttacgctgtgagagttccataaccgcacctacatagtcatttggtaccatgatttgtgctttgacaaaaggttcttcgacattttcaatagtacctggttcagggaaatctgctggattatcgactgtcacggttgttccgtctgtcttgttgacatgatagataacagaaggcgctgtcgtgatcaattccaaattgaactcacgttctaaacgctcttgaacaacatccatatgcaagagacctaggaaaccacaacggaaaccaaagcctagcgcttgagaagtttcaggctcgaattggagtgccgcatcattcaattgcagcttctctaatgcttcccgcagatcattgtaacgagaagtatcgattggatagagtccacaatacaccattggattcatttgacgatacccttccaaagcttcttgggctggattatttgctagtgtcacagtatcccctacttgtgtatctttcactgttttgatagctgctgtgatataaccaacatctcccaccatcaatgcatcccgttggatcgctttaggtgaaaataccccaacttcggtgacatcaaaggtttttccattactcatcatttgaattttatccccaggtttgaccatcccatccatgatacggacgttcagaacaacccctcgataagaatcgtagacagaatcaaagatcaatgctttcaatggcgcttcaatatctccagctggtgccggtacatattcgacaatttgttctaagatatcttcgatgccaattccggctttggcactagctaaaaccgcttcacttgcatcgataccgataacgtcttcgatttctgtacgtactcgttctgggtctgctgctggcagatcgattttattgatgactggtaagatctctaagtcgttgtccagagccaaataaacattggctaatgtttgagcttcaatcccttgagctgcatccacaaccaatacagcaccttcacacgcagccaaactccgcgatacttcataagtgaaatccacgtgtcctggtgtgtcgatcaaatggaaaatataggtttcaccatcttttgcggtataattcaactcaaccgcattcaatttaatggtgattccccgttcccgttctaagtccatggagtctaataattgattttgcatttctctggacgttaccgtatgagtttgttccaaaatccgatcggctagcgtagactttccgtggtcaatatgagcgataatggaaaagttacgaatcttttcctgtcgttttttcatttcttctatattcatggatacgttcctcatttcttttagtcagcttttctattataccaacgaaatgctgataattaaagtatttttcttgaccgatatctaaacaaatttgttcaggttttgctatactatagctagtaaataaattggagttgaaagaatggacaataattttcatcaagatttgcatattcgaccagtagaagaaaaagatgtcgatcagttcaatgagcttctaagctatgtttttcaaatcactgagtcggacatcgaggaaagcggttatgaaagcaagcgtgaaatgatcaaatcaaaacgaccaatcttggaattatctaaagtgttcgggtggttcaacggtgatcagcttgtttcacaaattgctgtctatccctgtgaagtgaacattcatggaactctttacaaaatgggcggcgtgaccggtgtcggaacttaccctgaatatgcgggacatggactgatgaaagacttgatcaaactcgctcttgaaacgatgcgagcagatcagcaatggatctcttatctctatccttataatgttccttattatcgtcgtaagggctgggagatgatgtcagataaattaaccttcaaaatacgtgatacccagttaccaaaaacggtggaagttccagggatcgttgaacgaaaagaggtagatgatcctgacgttttcactgtctataatcaattctcaagagaaaatcatggcgcattacagcggaccgctttccactgggaagaatactggcgctacgaaaacgaagaaagccgaacagcagctgtctattataataaaagtggtcaccccactggtgtgcttttttattgggtcgccgaagaagtctttcacgtaaaagaaatgttttacttgaatcaagaagcccgcaatggattatggaactttatctcggctcatttctctatggtctactgggtcaaaggcgatatctataaaaatgaacctttggctttcttgttggaagacagccaaatcaaagaaacgatcgaaccttactatatggcacgcatcgttgacgtaacagagtttttgaaaaaattcccctttaaagcattcgatcagccttttcatttcgttgtctccgatcctgttgctgaatggaataatggtatttttggattgaactatgctaaaggtgaagtcatcgtttcgaatgatccgatcggaaaagcggtccaattagatatccaaacgttaacttgcgtactgatgaattatcgaagacctgcgtatttggctcgaatcgagcgtctccataccgattcggatacgttacagttattggagactattattcctgatatggaagcttattttggcgactatttttaatcatgttgataaaatgaaggagaatgaaaatgaatatttactttgcagcccccctctttgctaaaagtgatctgctttataatgccgatctagtcaatcaaatccgaagcacctatccacaagcagatatctatttgccacaagaaaatgcatccattaatgataagtctgcttatgctgatagtaaaatgatagctcaagctgatacagaaaaagttttggaaagtgacctaatgattgcattattagatggtctaacgatcgatccaggcgtagcttcagaaatcggcgtggcttttgccaaagaaatccctgtcttagggttatatacagacagtcgccaacaaggagcagataatcagcaaaagattactgcactgaaaactgtagccgaaaatcaatttcattatttgaatctctatacagtcggtttgatcaaactgaatggagagatctattcttcagaaaacgctttactagaaggcttggctgcctatctcggggaggaacaataaatgggtgagaattataaacgtttattaaaactatttacactatttggcttccttgttttcgcattttctgtttgggaattctttcgaggtgtctatcctaaacagcaagcactgatttttctagttcaagcattactaggtattttgttgatctatgtacctgaattcagtaaaaagctgttccgtattcaactgcccaatgcgactatttacttttattggttctttctgttgatctcggtctttatgggaacgattttgcatctgattgaaattatttccttctgggataaagtactgcacacagttagtccgatggttctgacagcagttggttatgggctgatctgtatgttcctaaaagatgttccagtacgagaagtttctccatggctttttcttctgatgggatttgcttttgcaggcctgtgtggtgttttttgggagttctgggagtttatctgcgattcgcttggtggaatgaatctgcagcgctatgcgacgctagaaggcaccccattcattggccgcgaggcattgatggatacgatgggtgatcttttgaccaacacgatcggagctgtattgatgggattgattgcttacttccaagggcgaggcaagcctgattattttgaaagctatcgtatcaaaaaaattgaacagtgatttttatcaactgtctgaactaataaaattagttcagacagtttttttatccgaatgatttcgcaaaaactaattttgacaatgatctttttttagcaaaaatctcccaaattcattgaacccgctttcattaataaaggaataaacgttatttaataatttatgttattggacgagtcctctttataccaataattgcaaaaagaattgcctgaaatgcagtgtatttgatttcacgattttcaaaaggtctgttataatatttaacaataagtcgacctggaagtcagtaaggagatcgccatgattttgacggtattttttcttttgtgctgcatgatcttttcatctattacctatgccttttctaaagatgcacgaaaattcgtccaacccctgcctattaaaatcattttcattgcttctgcggcgattgccgtttggacaatgttcttttccgtgattgcgctagtagcttgggtcgtttaaaaaagcattcttgcatgtttcgagtgaagactcgctcctgtgcaagaatgcttttttactgtgcttttaaaataatgaaatttcacttaatggccagtaacgcaagataacttttccttgcatttgatcggcatccaccacaccgaaagaacggctatctcttgaaatcagacgattgtctcccataacaaaatattttcccttagggacggtaatagagaaatcttcagtgaattgggttgcactggccgcgatttgctggaataattcccggtagctatattccttttgcaactgatcatccgcaaattgcttcttaaaatcttctaagtactcttcgtgatactctttgccattgattgtcaggacgtcatttttcatctcgattttatctccaggcaaaccaattaggcgtttcaccgcaattttactggtatcatccggttctacgcaaataatcacgtcttgccgctgataacttgaaatcttggaagcaatcaagcgttgcccatcagacaaagtcggatccattgaatgcccgctgactttgacaggcgttaaaataaacaatcgaacgacaacaatcaccacaataaaagcgagaataaaccaattctcttttaaaaatttctgcatcttattttatttgctccttcaactattttctcagtagatccttcattagaaaatagacctgcgttttgcgtttacttctcaatcttacgtttaatttgccttttcggcaagtaaaatctttttacgaaagtttttttttaggagaaatttaccaatctttgtttaataaaaaggaagttcttaaaccacattgacgtagcataataacatgatgatttttttattcaaaagaaaaaacctgaaaaatagcggaataggcagaagactttattcaggtctttcccacagtatcattccgtctatcattcaggtaattcaagggttatttttctcgtttaagttagatgactaagaaatctcttattcacttatcggtgtattttcaaaaacaagctggtcattcaacacttctatcgtcacttttgttttcggcagaacacgtcctgcaacgatttctttagccagaggtgtttctacctcccgtgtaatgaaacgtcgcaatggtcttgcgccataagcgggttcgtacgaatgctctgcgatccattttttggcttcttctgtaatggataattgaatgtcttgattttccaatcgttgagacaattgagcaataattttatccacgatacctgtaacattggctaggcttagtggcgtgaacaaaattgtatcatcgatacggttcaagaactctggtttaaaatgaccgcgtaatagcgaacgaacattttcagccaccgattctggaatcgttccttccccagtcacaccatctaatagtatttgcgagccaatattgctcgtcatgatcaagaccgtgttcttgaaatctaccactcgaccttttgaatccgtcaatcggccgtcatccaatacttgcaataaaatattgaaaacatctggatgggctttttcgatctcatccaataagacgatcgtataagggttacggcgaacagcttctgtcagttggccaccttcttcaaaaccaacataacctggaggtgctccgactaaacgtgacacagaatgtttctccatgtactcactcatgtcaatccgcaccatatgatcttctgaatcaaacagattgacggctaacgctttggctaactcggtcttaccgactcctgttggtcctaagaataggaaagaacctaatggtcgatttggatcttggagacctgcacgggaacggatcaccgcatcacttactgcatcgactgcctcgtcttggccaatcacgcgttgatggagtgtttcattcaatttcagtagtttttcccgttcgccttctaccaatttcgcaaccggaatgcctgttaggcgaccaacaactagtgcaatttcgttttcagtcacagattcttgcaccattcgaacgccttccgcttggttttttgcttccaattcggcaagttctttttctaattgcggaatcgttccatggcgtaaaacagcagcgcgctctaaatcataattattttcagcatcttctaattcatgtttggctttgtcgatttctgcccgtttattggaaaccgcattgacttcatctttctcagtttcccattgcatcttcatggtattggcttcttcccgcaaatcagctaattcttcttgcaggtttgccaaccgttttttagaagcatcatccgtttcttttttcaatgcggcttcttcaatttccagctgcattaaacgtcgcgtgacttgatcgagttcagttggcattgaattcatttctacgcggatcgttgcactcgcttcatcaatcagatcgattgctttatccggtaaaaagcgatctgtgatataacgatcggataatgtcgctgcagcaactagtgcattgtcatgaatgttgaccccgtgatggatctcaaagcgttcttttagtccccgcaagatcgagatggtatcttcaaccgttggttccttgactaaaactttttggaaacgacgttccaaagctttatctttttccatatattgacggtattcgtccaatgttgttgcaccgatcgtatgaagttcaccacgagccagcattggttttagtaaattaccagcatccatgctgccttccgttttgccggcacccacgatattgtggatctcatcaataaataagatgatccgtccttcagatttcttgacttctttcaagaccgccttcaaccgttcttcaaattcaccacggaattttgctccagcgatcaatgcgcccatgtctaaagagaaaatcgttttgtcttttaagttttccggtacatcttttctaacgattcgttgcgccagtccttcaacgatcgctgttttaccgacaccaggctctccaatcaaaacaggattatttttggtttttcttgaaagaatacggatcacatcgcggatctcttcatcccggccaatgatcggatccatttttccactgcggacttgttgaacgaggtccacaccatatttttctaaggctttgtattgttcttcttggttttgagatgtcacacgttctccccctctcaaagattcaatggttgcttttaattctttttcattgattccttgaccttttaagtaattggtcaatggatggttttttagtttcattaatgcgagtaaaacgacttcagtcgataaatactcatcattgaaccctttttttagttggtctgcttcagaaagcaaacgaaataagttttgactcatgctttgtccgtattgaacattgccaccttcaacagatgggatttcatccaatagtcggtcaacttccttctcgaaagcatcgacatcaagaccagcgtccgtataaaaattgcggccaaattgattggcttgcaataaaattttccataaatgagcgatatctatctcctgatgatggcgtgttatcgctacttgttgtgcttctgcaatggcactttgtaaagttgttgtcattttttctgggttcattgttctacctccccgtcatttctaggatttctcctacattgtagtataccattttggtcagtaatggtcaaaagatatgcaagcactttttgactttcttttttagcaaactatcagcaaaagttgacataaggaaagctaagatggtatgcttaatgaaccatttcaacggaggaaaagcagatgtcacgctactattttaaatttatctttaaatttatcagaaaatctgctcttaacaagaacacgatgaagcattgttaagagcctacaagcgcctagcgcatctgcttcatcaaagactcggagtgaggtttctttctcatgccctggtttttggtggatactaaaaagattgtaagctgtagacaatgactgtctatggcttttttatatggaggaagatcatgttaacactatcaaatctatcgcaacaattcggcgacaaaatcttgtatgaagaagtcagcgttcaaatcaatcgtggcgagaaagtcggactgattggacgaaacggtgccggaaaaagtaccttgatcaaaatcattaccggggagattcttcctgatgaaggccaggtcactttcccaaaaaatctgaaaatgggctatttggatcaatatgtcaatgtggacgaaacccaaaccattcgcgatttcttacgctcagcctttgctgctgattttgaaaaagaggcaaaaattgcttcactatatggtgaatatgctgaaacattggatgatgagttacttgaaaaagccggtgaattacaaaatcaattggatcaaggttccttctatcaaatggacacactgattgctgacttagcggaaggtctgggcattgccattcttggtatggaaaccccactggtcaatttaagtggtggtcagcgatcaaaattaatcttagcaaaaatgttattggaaaaacccgatatgctgatcttggatgaaccaaccaatcacttagatgatgagcacatcaagtggctggttcaatttctccaagatttcaatggcacctatttggtggtttctcatgaccaacagtttctcaaccagatcacgacgcatatcattgatattgaatttggcaaattaacgaaatataccggcaatcttgaaaaatcactgaaactcaaagcgttgcaaaatgaaagttatttgaaacaatatgaagcccaacaggcacatatcaagaaaacggaagcctatattcgaaaatataaagcgggctctcgttctacgatggctaaaagccgagaaaaacaattagcgaaaatcgaacgattaacgccaccaacagatgcgccgacaccgcatattgcttttccttatgcccctatcgtcacaacattggcgttggaaacaacacacttagaaattggctatgacaaaccgcttttgtcaccgatcgatttgacgatacgctacggtgaaaaaatcgctattcgcgggtttaatggaattgggaaatcaacgttgatcaagacactcttaggtcagataccggctatcaatggatcggtttcatttccccaacacacaaaattcaattatttctcgcaagacttaacttgggaacaaccattacaaaatcctttgcactatatgagcgataaatttcctaaagctataatcaaagaactacgccgccaattatcccgtgcaggattgccgagtcagctggcacaagaagcgctaaaatcattgagtggtggcgaacaaacaaaagtcaaacttgccgaaatgatgatgatcaaaagcaattttcttctattggatgagcctactaatcatattgaccaagcaaccaaagataatctgaatgcagcactggctgattttcaaggaactgtcttagtggtttcccacgaagccgatttctacgaagactttgcagatcgaattattgaattaagtgaataagtacgacactaaaaaatctcgaagaagtgccgaaatttcagcgaactagctgaagtttttgaggcatgccttcgagatttttttgatttagatttaataggagaaagaaaaagtttcattcctttgctcacgctttttcgttcttcaactcttccaactcagcactcatggttttgcgtttttccaaaatgacatagacgaaaccgatcacgaatggccaaataaaagtagcaaatcgataaagcaacatcgatgacgctgcatcaacagtccctaccattggtccaaaaagtaacatataaacaaattcaaacgaaccgattccagccggcgtaggaataacacccgataggatcactgcaaagctgacaaaagaaagcgtcagtaagaagtcgatttctggatgtttaggtgccaatactacataaggaatcacataccaagcagccaatttaacgacattccagaaatagatccgtaaaaaagccgtacgatcacggagaatcgaatagactgtctcccgtaacgagtaaatctgcgtattgcaagtatcgatgattttgcgcatgctcttacttttgaaaagtttgtcgctgattaccacaaaagcgacttgaacgttgacacttacagaaagtgcaagtaaaaaggcaataatcagaaaagtaacgaccataccagctaatatcacccaaatcatatttggggctttctcaaagaataaagaaaattgaatcactagccctgcgatagcataagtcaagaccgccaatttatacatgaccatatgcaacgtagtcacacctacaccttgtgacaatttcaatccatttttacgataaaaattgacttctgatatcaacgtcccagcaccaaaagtaataattcgatagaatccagagtaacaaacggtaaataagccgtctttcgttgtaaactccggttgaaatcctacagcgatctctttgacggaacgtccttcaataaataagtaaattgttcctaacgccatcactgctgtaacgatcgacagactggtttgtcttaattccgccaaaatatcagtcatagagctgcgaataaaatagtacatcgcacctaagatcacgaccattaatagcaggtttaaggcaaatttcacttttgctttcatttttaactccttaggcaaacttaataaacaatagaagatctacaatcacaccgaaagcaaaaaaaatataaaatttacgtttgcgtgttttatggtgaaaaacgcgttgcgcgatcaatccaccgattccgccgccaatcaatcccataaacaacagattccattcagggacacgccatttttttcttacggcttggtatttatcataccccatcaagccaaaaagataaagattcgctataagtaaataaaaccacaatggattttgtataaattctgtcatcatttctcctctggttgatattatttagcatccaagtcttcttcttgaacacggacacgaagggcctgtttcatcaccttcattttaacaggcagattatctgtcggatcgccatcagttcgtgtataaacagttttttcctgagcacgaatctcaatttcatttgcagtaaagtactcgacacctggcactttcgcaatatgaccacgtatgatccggggcaaataaataatgaattccaatagattgagttttggcaataaaatcatgtgaaacagcccgtcatctggtcgtgccaactcgtcgaaattggtaaatccgccagctgaattggacatgactactgttaacaattgactcttgccacgccagcgttttccgtctgcaataatttctaatttgtattgtttctttttgaataaataatggaaaaaccgcttggtaaaagcgagtggtccgaactgttgtttttcttcttgcgaagtagccgctgccgtatcggccagcaatccgatggtcatcgtcgagatcatcatggagtcattgaccaatccataatcaatttgtcgatcagtcccattcaatatcgtttcaaatgcttcttcaggtttgagaggaatccctaacatacgggcaaagttattgaccgttccgcctggaataattgccactgtcagcttatctaactgatccacaaatgtttgcagcgcatgatggattgtaccgtctccaccaatgattgcaatcgtatcgatttgatgttctttcgcatttttttggattgtttccggctcaatatcaggattggaaggttgcaagactgcttcacttttaggatcatgttcttctagatagttcttaaaagactctgcagtatccttggcatcgcttttaccagccgtatcattatataaaaccatgatcttcatatttttcacttcctaaataaaatagggctgcgaatggtgcagacttctgcatcaagtctcagcccattattcaactcatttttcattatcaagcgatatttttccacttgaaaacgaaacaaaataaagttctactgtgcgtttttttcggcaatcttcacgattacatcagttgcttttttcattgattccaaggaaacaaattcatagcgtccatgcatattttcaccaccggcaaaaatatttggtgtcggaatccctaaataagagatcttcgatccatctgttccgcctcgaactggttcgatcactggctcgatacccagatcttccattgcagacttagctaactcaataatactcatgtctttttcaatgatttctttcatgttgtaatattgatcatataaatccatttggattcttgcttcgtcaaattgggcattcattttttcttggattgtaagcaattgttttttacgattttcaaacgtttcacgatcatgatcacgaatgatatacgccatttttgcttcttcgacggttccgttcaacgccatcaaatggaaaaagccttccgcaccatcggttttttctggcacttgatctgttggcaattgattatgaaaatcaatcgccaattgcaaagcattgatcatcgtatcttttgcggttcctgggtgcacatttttcccttggatcgttagttcagcttgtgcagcattgaaagtttcatattgcaactcacccactggaccgccatccatggtataagcaaaatcaacattgaaatcagccacatcaaatttatcagcccccaccccaatttcttcatctggtccaaaggcgattttgatttctccgtgtttgatttcaggatggttaagcaaaatttccatcgccgtcaaaatctctgcgatacctgctttgtcatcggctcctaaaagcgtgctgccatctgtcgtaatcaatgtttctccacgataatttttcaaattaggaaagtctttgatattcagtgtaaatttgccctctttatccaatttgatcgttgactcaccgtcatagttttcaataatttggggatccacattcaccgcgttaaaatccgccgtatccatatgtgcgataaatccaatggaacgaactggttcggaaacattacttggtaacgtaccaatcacaaaaccattttcctcattataatggacatcatgaagtcctaattcttccatttctttttgcaatgtcttggcaaacgccacttgcgtttgtgtggagggtgttgtttggcttgtcgcatcagaacgagtttccgtctttacatatcttaaaaaacgcggtaataaattttcgtacataattgatcactcctatttatattggaatggatttgtggaagtctctgaaggaataaagtctacctgccaaccttcttccgctttccattcattgaattttttgataaaacgagggatacattcccgttcaatgttatgacctggatcgattgccgtcaagctgtttgcttgtatatcatgagcggtgtgataactgatgtctccagtaatatatacatctgctttggcattcacggcttcttgataaaactgttcgccactgccgccgcatatagcaatccgttgaacgttttgccgctttgcttttggttcgatcaaacgcaacccctctaactgaaaaacacttttgatttcatcgatgaaatcttccaacaaaacaggtgcttttaattgacctactcgcccgatcccataatgctgagacaagttatccaaggaataaaggtcataggcgggttcttcatagggatgcgcctcaaccatcgcttgcaacaccttttcggtgatggtttctgggaaaatcacttcgatttttgcttcttgtaccgactcttcttccccaatttcaccaatcgcaggatgcgcatcctcttgaggagtaaaacggccggtaccaatcagtgagtagctggtgttttgataatttccttgctgtccagctccagcttttcctaaagctttcctcattgatgcgccttgctcaattggaacaaaaacagccaattttttcattttgattgtatgggtgggaacgagatacgtggtttcttctattccaagcatttcacaaaaccagtcattcaacccatcatgaataatatccatattcgtatgcgcagcatagaccgaaatattatgtttgatcagatccatatacattttttgttgcggatcatcggctctcaaacgacgtatggaacgaaaaatcggtggatgtttggcaacaatgaagtctacttgtttttcaattgcttctgcaatgacttctggacgaacatctaatgtcatcattacccgttggatctcgttgtccaacgttccgatatgcaatcccactggatcaccatcttctgctaaccattgcggacaatatctttcgaaacgttcaataaacgttctagctaacattattccagcacctccttgatccaatcaatctgttcgtttaactcacttattttatcttgaggaggaattgccgctttctctagttcttgcaaaacgatttctcgctgctgcaattcatgggcccattttttataaaaaacgagatttttttctttcaataaacacgggccaaaaaataattcttgtggtgtatagattttactgccttcttcagctacgatgatttcgtagtttttatggttttcttcaatcagttcttcgtgtaaaatcatgtaattattctcctgaagccattctcgcaaagtccgctcccccacattgggttgcaagacaaggcgctccttcccagtaattttctgctgagattttccattttctaaaattgttcgaatcaaagtgccacccataccagcaataaccaccgtatcaatctgatcatcaggttggattgcagctaacccatctgctaagcgaacagtgattttgtcgctcaagccattttttttgacttgccgtgaagcagattcgaatggtccttttacaacttcacctgctactgcatactgaattttattttgtagcatcaatgccacgggtaaataggcatgatctgatccaatatctgccaagcgggcttgatccggaatctgttcgccaacacgagtcaatcgcagggataatgattgttcgttcataacgtcactccttcagaaatagtatatcattctttattgcattttaaagggagagtttttactccttttatttacggctttacttcacctagagttgcttttgcacttttcgtaaagaaaacttgcatatcttgcttttcaaaccaatcgttgtgatccatatgaaggttactgcgctcccgtcacccagttgagtatcaatcgcagtgattcatacgaaggttactactctcccttcggtcgtctagtactgctcatcatctgctctgtcttgcttcgcaagccaatcgcagtgattcatacgaaggttattactctcccttcggtcgcctagtactgctcatcatctgctctgtcttgcttcgcaagccaatcgcagtgattcatacgaaggttactactctcccttcggtcgtctagtactgctcatcatctgctctgtcttgcttcgcaagccaatcgcagtgattcatacgaaggttactactctcccttcggtcgtctagtactgctcatcatctgctctgtcttgcttcgcaagccaatcgcagtgattcgcagcaaaacgcgttgtccgttgggacaacgcgtggggttattgcacgatttcaactgttttgattgaatttcctggaacttgaggtgggattgacatagtcattactggcaagcctgacaatgtgacttggaccgttgttcctttggtcaactcagaaacttgaccttcaaatgattcttgcggtgcgtgtaggatcacgccgtctgtttgaaagttaggaacaatcgtttcttgatcgtcgactgcttcgatatcatttagaaaaatctgtatcgtttcgttgtcgccagctgttgcattttcttgaagaactcctgtaaaaatagtcgttgcctcgctttcgacagtgctatttgttgtgctttcatcgtttttagttgtttcactcatcgaatcattatctgacggcgaaccgcaggaagctaataataaggttgtcaaagccaaacctaaaatcgtcaatttcttcataagaagttctcctctcttctatatttccgaattccggcgatttttgccagtcatttggatctcttttgtcaagtaacgaattcgttccatgatccgcttggctttcaatggctctgattctccacgttgagtaacggatagatgcttctctaactcttgcatggaaaagttggaggaaaagaacgttggcagttgttcttgcatccgatattgcagaatgacaccaaagacttcatcacggatccagctgctcatggcatctgcaccaatatcatccatcattaggatgggggcttttttaactgcattgagtttgtcgccaaccaagtctttgccgattgcttgtttcatttcgacagcaaatgtcgggaagtgaacaagggtcgtcgtataacctgcttccgcaaggtcccgggcaattgcccctagtaaataagttttgccgatcccaaaactacccaccagatataatcctttgtgaaaagcccttggatcgttttttaggttttcaataaactcgactgcagccatcaaagcttcgccccggccgggagtactttcatactgagcaaaattggcctcttgaatatctttcggcatatccattgctttgatgcgactacggatctcttcttgtcgttgatgcgctaaaagctcttgcgtgggcacataagtgacatcgataaaatgaaagttcaacgctagtcgtggctcatatccaggtgcaatcatcgtagggtcattcaaacgaaactttcgtttttcttgaacaaattcatagagtttcgcataacttttttggatatctgcatctgtcagttcctcccgatgttctgaaatgaattctttgacatccggatctttcaatacgtcccccatcatttctgagaaacgatcgcgatagtttcgtttgtctaaaatttttgatagattcttcccaacatcttccattaattgtcacctgctttcttttgcaagtaggcttgcagttttttgtcgatctctgcctgacgttctggggataatgtcgtttcttcaactggtttttcggcccagcttggcagtttttcttcacgaatgatctttttagacgggctttgcggccgtgtgcgtttttcttttgcttctttaactaagtcccgtacatgcttgatcgcttcttccgcggtttttacttgcaattcagaccattgtgccgcaatgttattgacataacttgctggcaaagccgcattgttctgtaccactaacacataatgaataagaacattgatcacactattggataatggcgagcgttccactaagctttttagcagccattgttcggagtctgtgacaaagctctttttttcagctttgattgctttcaagaatgccatcggcgcattattctcactttcgcggatcaatgctagatcgttatcactatacccattttgttttaatgtattaaatcgtcggatctcttcatctgaagtgggatccactttattttcagttttggtaaaacgcgtccgtgctttttgtaaaatcaattgttctaatgccttctgatcgattttcccagtagttaaagaaaccgaatctgtcatcagatccaacagctccatcacatcatagccgtataatgaatgatataggagtagtttttgccgaaaatctttatcgaaattgtctgcacggatgtagcgacgttgagcttcataaagaagaaaatcccaatctagttgttgttcatctaacaccagtctgctttgagtgtcttggaatttgccattgacttcctgtaattcctcttcattggctgcaaattgttgtgtatccaagcgataagcatccataaaagaagccgtaacttcttgatagccttctgcttgccattttgctggttggaacaacgaaacaagttgtcgaaactttcgctctccaacatggttaagcaataagaaactatagagttcatcttgaaagaaatcgctcgcatgaactggctcttgcaggtgatacaaaaatgtgattcccaactcgtcatcttctttttcaaacgttttgagtaagccgattccttctaacttatttcgtgcttgaataaaacgctgtaaccctacattcatcgcattcaaaatatctagatgaataaactcactttcttgcggatcctgctgatccgcagtcagtgtcagatagagtgctaaggcatcactttcgatgattggctgataaagatgaatcagcgcatccttcccttcagttgttagtggacgacttttgaagacacgatacaattgatttggtaatatgttgcccaccattcagggacctcctattcctcttgattgtctgctgtttcttgcggatcacttggttcttttgccttttcaacgatatcctgcaattcttttaagaagactgacatatctttgaattggcggtagacactagcaaaccgaatgtaagcaatctcatctaagtcgactagatcttccatgacatattcgccaatcatcgttgtcgaaacttcattttcacctagtgctcgcacacgattctccacatgatcaacaattttttccatttgttccattgtaacgggtcttttttcagcagagcgtatcaaccctcttaatatcttttcacgattaaattcttcacgagcgccatttttcttaataactaataatggtgcttcttcaattcgttcaaatgtggtaaatcgataaccacagttttcacattcgcggcggcggcgaatcacgcgaccatcgtcggcttggcggctatcaatcactcgagaattgttatgatgacattttggacattgcatagttccaccccgttctctcttccgtgtctcgaatgatagcgagacagcgatgatttatatgcttaattataacatgaaattcttctatctaataggtaaagtctttcaagcgaaagaaatattacaaatttaaataatgtgacggttgtttttttagccacaaaagaaaaacgacagaatcaattctgtcgttctcctccttatctcatttgtaacagtgacacaaactcatccagagtttcccgttgttccatttgttggttgcattgctcactgtcgcgacaaatgtaatttcctcgtttggtgtatgttccatcgccaccactttttgtcaacgataaaaacatggagacagtagactcatgttgacataaaggacagattcctttttttacttctgtagataaatgaccatagattccttggtagcctttttgagtatttacgatcataaatttactttgactgccgatgtcatcccaagccaaatacgtataatcacgaaggtctgtttgggaaaaatcaggtacttttaatttttttactttacgaaacagtttctctgtttgtttgactgaaggcacttgaaaaggtcggacattcttttttagtgcttcaagaatggtcaagctctttgacatcgtcaaagatgaatcaaaaaattgacgaatcagagactgtgcttctttgtcctcctcagaaaaaaatggttgaatggcttcttcagttaacatttcaactgtgcgaatcgtatggcgatcattaacagactgataagtccgaactaattgttggacttgatgtttgatgaaatgaaattgatagggttcaatggtaatcataatagatatcgatcctctctttaatgaaaaagcaaaagatattactgataaattcctctgatcacagtcaaggacaatgcagaattcagcatttgttgaccacctcctggacttcccttttttgtggaaagtcattggctattatagtttttccttcaggggttgtcaatcattgtccgcagacagcattcttttcttgtcaaagtggaattattgataccttttaaaacaggattttcttcttttttatctatttatattgattgacgaatatggtttatcataaaaaaaactccagatcctgtctagagtttttcttcgattcctgtataatgtttcaaatgatcagcatcccgtcgttcggttgaagagatctttgcagcatctgtgtcttcattttcgtttagcaatcggtcccgaccaagtgtttctaatgttttatcacctggttgagcatctaattcatcatgccgatcctcaatttcgtctacctgttgttgacggtgatcttttttggcttttgcttcatttgcctgttcttttccttcttgttccattttttcattattgatccattcaccaattttttcttttgcagaaccaacaattacatctttttcgtctttcaatgatcccatgatgattcctccttttttattagcatagcaagaatttcttcgattgacaaaagatacgtatgcgcttcatttaaagatatggtatactgaatcaaattttcagaatattctttgacaaggagcagtttatggacatcttaaattttgaagacatccagttggttcgcaagcaaactgttttgttgcaagacatcaactggcaaattgctaaaaatcagcattgggcacttttaggattaaatggtgctggcaaaacacttttattacaactgatcattgggatgatctggccgacttctggcaaacggcaagtcctaggtcaagtctacggaaaaacatctgtgccagaccttcagcgcagaattggttggataagtgcgaccttgcaagagaagattcctgctcaggagctctcagaaatggtcgttctatcgggaaaatatgctagtatcggtatatatgaagactaccaaatgaaagacttgaaccaagctattgccattctttgttcaactggcggcagtcaactgattggccagccatttcatcagttatctcaaggggaacgtcaattagtcttaatcagccgcgctttgatggcaaatcccgaattgttgattttagatgaaccttgtaatggattggatctttttgctcgagaagaattgctaagtcgaattggcgagatggtgcacaaggaatcacctacgttgatttatgtgacccaccatacagaagagattttaccgatttttgaccatatcatgatgctgaaaaatggtaaaatccacgcttctggcaagcgccagcaaatttttaacgaaaaaacgttatctgctttttatgggaaacctgtttttttccatgaagtcacttccgatcgcctggcagttttaccaaaaagcaactcactaaacaaaaaatgaaacaaaaaaagagacagctacaaccaaagcctctttccagatatcctttctagcttcagtttccagcaaacgacaaaataatgcgtcaactgttagcttttcagaaataaagggggctcctttgtgccggtgtctctgtcttaattctttcttttagcaagccattcttgtacttgcgtcttaacttcttcaatggttccttgattgtcaaagaggatatctgcccgtttgcgcttctcttctattggcatctgactattgatacgttgttgggcttcgatgctggttaaatggtctcgcttcatcagtcgctgcaactggatcgattccggaagatagacgaccgctacttgatctagcagggattcataaccagtttcgtataacaaaggaatatctacgatcacaagatcagcttttgctttcatgacttcaatctgtcgtaggatttctttacggataaagggtcctaatgagcggttcagcaattcccgtttattgtcatccgcaaaaatgatttttcctaattttttccgagctagtgtcccatcgggattgatgacctctggcccaaaaacagttttgattttttcaagccctggcatccctggctccaccacttcgcgagcaacgatatcagcatcgatgattgggataccagcttcttcaaagcacttgacaacggtactcttgccagtagcaatcccgcccgttacacctacaaccaagctcatctttctgtccccgcgtgtaattgctgacagaatggacaatagtgggtccctcgttgtgcaacttttgtttttacgatcggggtaccacagcggacacaaggattgccggtttgaccataaacgtgtagagagacttggaaatgccccgcttcgcctaacgcattcaaataggtccgaatcgttgtgcctcctgcctccactgctcgggctaagacatcaatgatcgcccgatgcaacaagttaatttcggcttcattcagtgtcgctgccgattgctcgggatgaatctttgcttcccataaagcctcatccacatagatattgcctaaacctgtcacaagcttttgatctaaaagcagcggcttgatggctttttttgatttctttaggtcacgagtaaagtctgtcaacagaaacagttccggcaatggttccggccccaactgcatgattcctttatacgtactgctctggtctttttcaactaaagtcatacgtccaaattttcgcacgtcccgataatgcaattcactgccatcagtgaattgaaaaatcacatgggtgtgtttgtccggcaccccttctttttcaaaaaattcatacttgccttccatgcgtaaatgggaaatcagatcataatcggtcaatttgaaaatcaagaatttgcctcgacgatcaaaagcttgaaattgttgtccttttagcatcgctgcaaaaatcggtacttctggagattcaatgatccggggccaacgaatctccatttctttgatcgttttatttaaaatcagtttctctagtcctctgcgaactgtttccacttctggtaattccggcacaacatttcacctcatttattttgcttcataccacgttttgccccagttactatctgtcaacaatggcacatgcagtgagacagcattttccatgacttctttgacaagagcatctaagcgttctaattcatcttctggtacttcgaagacaagttcatcgtggacttgtaaaagcatcgttgcttgtaatttttcttcctttagacgacgatccaaatcgatcatggcaattttcaaaatatctgcagcactgccttggatcggtgtattgattgctgtacgttccgcgaatgtccgcaaattaaaattgcgggaattgatatctggtaaatagcggcgacgatgatacaatgtttccacatagcctttgtctttcgcttcacggacaacttcttccatataagttttgacccctggatatttttcaaagtaggtatcaatatattgctgcgccgctttgcgagtgattccaagattttgggagagaccataatcagagataccataaacgatcccaaagttgaccgcttttgcttgacgtcgcatgtttggtgtaacttcttctggagtggagatcccaaagactcgcatagcggtacttgaatgaatatcttgtccttctacaaaggccgcttttaaatgctcatcattcgagatatgggctaaaacccgcagctcgatctgagaataatccgaagaataaatgacccaatctttggctcttggaacaaaggcttctcgaattttccgcccttcttctaatcggattgggatattctgcagatttggatcaacggaactcaaacgtccagtttgtgttaaagtctgcacgtaacgggtatggactttgccatctccttgaatcactttaagcagtccttccacataggtggattggattttggcaatttgacgatagatcaaaatgtcttcgacgatcggtgcctgttccttcaactgttccaaaacatccactgccgttgaatagccagtcttagttttcttgatcactggcagccccattttttcaaataaaatcacgcctaattgttttggcgaatttaaattgaactcttcgccagcttcttgataaatcttttgttcgatttcatgcaaacgttctgcaaattcgcccttcatctgatgcaaacgagaagcgtccacgcgaatcccagtgatttccatctctgctaaaatttttgataatggcaattccatatcagtaaagagtgcagtctgatttttctctgctagctctttcgccaaacggacagaaaggtagttgatcgccgcaacttttcgagctaaatgagcgaaaaagacttcttcatctgccggtagtcctcgtttcacacctttgccatagatagcttcgtccgattgaatcgcatcaaatccataatgcttagcaacaccagcaatatcattatttgaatcattggtatctagcaagtaagcagctaataatgtatcaaaaacaatcccttgtggtgcagccgcataacgattcagcgccacatacgttcgttttgcatcatagactttcttctgtgaagaggcattttttagccaagcaataaaatactcattttcaaagagatcatcttgattggtcacataaattttttgctgattcccccaagcgacaccaacgatatcttctaaatgatagttatcgcccagcatctcgatataaagagccatatcctcagtaaacatttccggagtgacctctgttacaacgtcaaaaagaatatcttccatttcttccggttcagtcaccacatttaatttttccaagaaagaattgaagttcatttcttgatagaatggaatcaatttatccagatcttttccttcgtacttcaatgaatcaatggccacatccactggcgcatccacatcgatcgttgccaatttttttgacaaaaaggctgtctctttatcattgagcaagttttctttcatcttgcttggcttcatctcatcgatatgctcgtagattccttcaactgaaccatattctttcaaaagtttgatggccgtcttttcaccgatttttgtgacaccgggaatattgtcagaggcatctccagctaatcctttcatatcaatgatctgtaatggcgctaaaccatcatatttttctgcaacgtgatctggcgtataactttcgatctcgctgacaccctttactgtgatatcaaccttcacatggtcggtagccaattgggtcaaatcgcgatctccagataataccacaacatcaaattgctctttgtcaactttttgtgccaatgtgccgataatatcatccgcttcataattgtccagttcataatactgaacacctaaagcggtgatcaattcgcgaatatagggcatttgttccttgaattctccaggcgtttttgaacggccgcctttatattcctcatacatcgcagtccgaaaagttgttttgcccgcgtcgaaagccaccaggacatgagttggctgttcttttgccattacattttcaaacatggtgtgaaaagcgtaaatcgcattggtatgcaaaccattgttgtttttaaaacgttccaatgaattgtgcagtgcaaaaaaagcccgaaatgcgacactatttccgtcaactagcaataatttattttttgtcatttgaataactcctcacctcaaaagttctctcttattctatcaaagaaatccatgaaaagcgatggattgcctttgttcgattaagccaattgcaaaaaaaaatgcgagtttcctcgcatttcctcattagttgtttttaccaaagattcgcaaaatcgctaagaacaagttgataaagtcaagatacaactgtaatgccatgaagacagccattccagtatttgcttggccattcgttgcttggtatagattacggatctgttggttgtcataggcagtgattcccataaagacaaatactgtcacgatcgacaagaaaaagtcaactggaccactatgcaaaataaacacattcagcaatgtcgaaatgatgatcccgatcaatatgccgtagccgattcgtcccacaacacttaaatcacgttttgtcatgataccaaatgctgacattacgccgaaagtgatcgctgcggaaacaaatgcacctgcgatcgatccgaagtcataatacattaatgtaactgacagcgtcaccccatttaaaagggagtaaaccagatatcctgctatggtcagcgaaggattcttttgcgcttttgcgcctaataccaagaccaaaataatttgaaggatccataaccctgtaaagcctagtggaaaattacggataaaattcattgtttgttctgcaaatacttgtccgaaaaagtaggcagacactgcgctaattcctagtcctacagcaaaaaatagatagactttggaataaaaacgattgagcccttgggcattaactacttcattgttcattttcttcaccttcctctacgatttttggaggttggaccatcactactgcatccaacacacgatcttcttgcgtattgacagcttcaacagagatcgtcactacgtctttcatcttatcgactttgatcacttcgaaatcgaaggtcaacgtctcataatgaaaaacaggttcaataaagttcaccgaaaaattcaccacatgagaacctggtcctggcaaatgtttagaaatcgcacttgtaataatccccatcaacattacagaaggcacgattggccgttggtattctgttttttgggtatagtcatgctgaatataaagcggattggcatcatttgtcaaaccgagatacaacaaaagctgactgtcttcgatcgattctgttaaagataacgaatcgccttcctcgatttcatcaattttcttacctaattttcgcggtttaccaatgttcaaatttatttcctccaaaataaataattttactctgatttcattttatcagatgcagataaaagtgcaagttcgtggtgcgatgtcccaaaaaagcaaaaacggggtgctgacttttgtcaaatcgatgcgagcaatagcaacgaaggctaaatagtaagtctcactggttgattttgtatcatagttctgttgacagccagtgcaaatgagataccatttgtttcgttgatctgctcgggtgatttgatttggtcatcgctccgtattttttataacacgtttcgagtcgtattactcaacaacttttcataggctgattcaaacttttgtacgtccccggcacccatgaaaatgatcacagcatcttgatgatccaataatggtgacacattctcttctttgatcacttgtccacccttttgaatcttgttcccaagatcttcaattttcacatcgccgcgagattcccgagccgagccaaagatatcgcatagataaacgctatcggctagatccaatgcctctgcgaattcgtccatcaatgcaatcgttcgggtaaaggtatggggttggaaaacagcgataatttctttttcagggtatttttggcgtgcgccgtcaattgttgctctgatttctgccggatgatgagcataatcatcaacgattgtcatatcagcgactttcttctcactgaaacgacgtttaacaccaggaaatgacaacatttcttccgcaacttctgtcatatccagcccttctttataggctactgcaatgacccctaaagcgttgttgatattatgttggccaaatgccggtaacacgaaatgaccgatgttttcgttatggatatagacatcgaactcagaacctgtcgttgtacgctgaatgttttttgcttgtacatcatcatcatcattcacaccataataatagatcggtacatctgcttctaattttcttaaataggcatcgtcaccaaacgcaaagattccttttttgacttgcttggccatcgattgaaaagctgagaaaacatcgtcgatcgattgataataatcagggtgatcaaaatcgatattcgtcatgatcgcataatctggagaatacgctaaaaagtgacgacgatattcacaggcttcaaatgagaagaactctgcgttagggtctccatgacctgttccatcgccaatcagaaaactagttggacgaacaccgctcaacacatgggacaatagacctgtcgtactggttttaccatgagaaccagtgactgcaatacttgtgtaaggttgaatgaatttaccaataaaatcatggtaacgcgtaatttctaaccctaattccttcgcacgaaggatttcttcgtgggtatccggaaaggcatttccttggataatcaccatttctggctgaatattctctttatcgaaaggcagtaatgtgattccggctttttccagatcacgctgtgtaaagaagtactcttccacatctgaaccttgtacatgatagcccttttcatgcagaaccaaagccaatgaactcatgccggaacctttgattccaacaaaatgatatactttgtcttgattttccattttttaaaatcctcttttctcaagttcacattacaataaacgcatgtttattaacatttagatttgttgcacgtcctacattatcatacaaaatgaaaaaaatagcaacgagttttgtttttgggcttgactttttgctcaaatcgctatttctttcaagcgtccgcgacactttccacagccataacgtttagtgttcagccttctcgttcgcttgatcacagctccacattgttgacactggtactgatacttcgcatttttcatcatacttggagcataacgaagtccaccagtagctgccaaaagagctttgaattctggatctcggtgtcggtagcctttgccagctaaatgcagatgatagtgacacaactcatgcttgatgatttgaatgaatgtatctacaccaaattcagctaataaatgcggattgaaatctaaatgatgatcgcttaagtgataacgtccaccggtggtctttagccgcccattgaaatacgcctcatgttgaaatggtttgccaaacgattctagagaaactttttcaacgagctgctgcaattctttggtggtcattttccgtgtgttggatcaaccattgtcaagctgattcggcctttcgtggtatcgacttgttcaatccagacagtaacgatatctccgacagcgacaacgtctttcggatgcttgacaaaatttcggcttaattttgataaatgaaccaaaccatcttgtttgacaccaatatcaacaaacgcaccaaagtcaatcacattccggacagttcccatcaattccattcctggtttaaggtcttccatgctcaggacatctttacgcaataatggtgccggcatctcatctcgcatatctcttccaggttgcatcagtgatttcaagatatctgtgatcgtttcttttccgatcgctagttgtttagaaagatcagcaacatttaactgtgcgagtcgttctttggcttctgctgattgggctcctagttgagttagtttaactccagcaacttctaaaatttctttggctgcagtataactttccggatggattctagtgttgtctaaaatattcttcccaccagggatccgcaaaaatccaatcgcttgttcataagctttaggtcctaaacgaggcaccttttttaattggcttctttgcgtgaagctaccgttttcttctctgtaagcaacaatattttgtgcagtcgttttattcaatcctgagacatgctgcagcagttgaggactagcagtattgacatcgacccctacttggttgacggcagtttcgaccacaaaatcaagttggtcactcaatcgtttttgtgaaacatcgtactggtattgaccaacccctacagattgaggatcgattttgaccagttcagctaaaggatcttggagtcggcgcccgatactaatggcgctgcgttcttccacttgcagatccggaaattcttgacgggcgattgggctggcggaatacacggatgcacccgcttcattcacaatcacataaaatacttcatgatcgatttgtttcaattgttcggcaacgaattgttctgattcacgacttgccgtcccattcccaatagcgatcatttggacaccgtatcgattgatcaaacgttgcagtgctggaccagctgcttggcgtttattcatcggtgccggtttatgagggtaaataacttcgatggctaatactttcccagtttcatcaatcacagctaatttacaacctgttcggtaagccgggtcaaaccctaagacgatttttccttttaaaggtggctgcagcaaaagatttcgcaagttttcaccgaagatggcaattgcttgttcatctgctttctctgttaattcattgcggatttcccgctcaatcgatggtgcaatgaatcgtttataagcatcaagataagcctcacgaacaaatggagttgctggtgaattggcgtgcttaatgagttgccgttcaaaataatcagtgatttttgactcatcgacgactaaggcaacctttaaaacatcttctttttcaccgcgattcgttgccaaaatacgatgagaaaccattttattgatggggtgctgaaaatcgtaatacatttcataaacacctttctcatccttttcagtatcgcgaagtgtactcgtgtaacttcccttatttgcaaaataacttctgatccaagaacgatagatcggctcatctccaatggtttcagcaatgatctcgtgggcaccttgtaacgcagattcagggtcagggatggcttcattggtaaattctgccgcttttgcatagacatctcctgttgttggaaatgccgctatccagtcagctaacggctgcaagccattttcttttgcaatagttgctttcgtacgccgtttttgtttgtaaggacgataaagatcttcgacctgctgcatttttgttgcttgctgaatcgattgcgccaattcactagtcaattttccttgttcgtcgatcaaccgagcaacttcttgcttgcgtttttccaaattctccagatattgatagcgctcttcaatttcacgaatttgtacctcatctaaaccgctagtcatttctttgcggtagcgagcgataaacggaacggtgtttccttcatggagcagttccagtactttcgtgatttgtcgttgattgtaagatgtggtttcctgcattagtaagtgcaacacatcatgatttaattctgccatattcgttcacctttcaatttaactgctctaagtttaacataaaaagtttaacataaaaaagacacctcagaaaagagacgtaagtaacaggctaaaaacagaacatacagaacatgaggtgcgaaattaaagctcaaggtataaaccagcaaaaaacacttccgctgaatcatcagcaggaagtgtcatctacattcaaaatctttcttcaacgtcctcgaaagccttagttattaccaagcatggatgtttcctttttactatgcggatccatcttaactaatctgtttggaaatagtttgtataccctatctttttccaaggacctttagacccaatagtcataatgacacatagattcctctatgattagaaaagttttttaaaagtctggatgccaagggccggttaaattttgatattcaatatcttgtacaatgccgtcttcattaaaaatcacgccgtgaacggaaccaccaaaaacagcccctccatcaatgccaatcttattatcatgaaaccataaatccgttgtttccatgtcaccatgaagcatgggtgtgatggtatgtccaaagacgattgtttttcccgtatgattttctccagtatgaaatggctctcggatccagataaaatcgtggtcagaagtatcctgccaatgcttcttggtcaaatcaacaccagcatgaacaaaaagatatttttgccattcataagaaagcggccttgccatcaaaaacgccactaagtcacggtagcgactccggatcattaatgcaatctcagttggcgagtactcttctgttgctcccggatgtaaaagactttccatcgtctccttgcctccattgcggacataagcggaataccagtcttctggtgcgttcaaaaattgcagaaaatattcttcatggttcccgcgcaaataaaccgctcctgtctcttccaccaattgtttacccaacaagagacactctttacttcgtggccctcgatcattcaagtccccaatcagaacaagctgatgcagtgatggatcgtaatccaataaaagttttttaaaaagatcatacatcccgtggatatcactaatgacgtaaatgagttttttcatttgggttcatccccttctttaaattattataaaaaagccagcgaaactttacaactgttagccctttccttataataaaaccaactaaaggagcgagaagatgaattggctgcatcaacaatggatccattttaaaaaagacatgcgagaagcttttgatacaggggctatcgctgcacatggtaagaaatagtttgaattttgattgttaattgattgaatcaaaaaaagagaattctccagttaagtactgggaattctctttttttattttccagaaacagcaaagtaattaccatctggatctgcaaaattaaagaccattcgttcttccatctggatcaggtcgccaacttctacatttgtatctagtaatttcttgtaaagcgttgtgatatcttccgaaaaaaacatgatcgatggtgagttcaatgctacttcaggagaatgggcttcaataaagcctttatcataaagcacaaaacgagcatctgattcgctgcttggtgctatttcaacgatagaagtcccatctgccgtttgctcttcaatgatttcaaatcccaatgattgccaaaacgcaacggatttgggcacgtcctctacatataatatgatctgcatttgattcgcaaacatatctctcactcctctgttgttgatgattctgatgtttctgaggcttcatttgacgtattgaaattcaattgcagacctggtttgtcggtaatgatttctgttacttcataggttaagcgtttgataatatcaaacagcggctccactaagcggtctgtctccgctttgcttaagtcttcacctgaacggacttgccggttcaagatgtgattgacctgccctacccgaccggacagcacatattcaggaaaaacgagttgaaattccaagcgggcgccaataatactattttgtttcatatactcttcatcttgtaccttcaacggggcaaagccaacattcaatttggtttccatttctttgtctttaggcttcatatcgaaatgataagcttcgacgattggttgttgtcgtttgatttccacagtcttcacactccttgattaaaagtatagcataccgatgacatccagcctaccttcattaaaaaaatccagacaaaaagaagcaagatctcttccatgctagaaaacttgttccgtcgttacaattggatcgttaggatacaatcttgacttgataaattgtttttctatctgatggttcttgcttcctgatggattcttgcttctatttcgttaagtaaaattttttatttaagcgttttgagataatctagtgcgtcttgcacatttgagactggtacgatcttcatgtcagtccctagtttcttcgcagctgctaaagcttcttgataatttgttttgatcgaaggatcaacttctttttcttccttcgtgatttcatcctctggtgcaaaaaagatttctacaccactttcacttgcgcttgctacttttttatcgataccaccaatgcggccaacggttccgtcactggaaatcgttccagtaccggcaatattatgccctttacgcaggttttgctgcgtcaattgttcgtagatttctaatgtgaacatcaagcctgctgatggcccaccgatatttcctgcatcaataacaatatcttgatctgaacttatttccgtatggtcaactaacgaaatgccgatgccggcttttttattcgatggcaattcaatcagcgatccggttgcttctttttctacatcatcttggagatacgtcacttggatcttatcaccgactttttgactttgaacataatcaataaaatcttgactgttgtcaaatcgttttccattgacagctactactgtatcaccaacagaaatttttcctttgaagctagagttggactctacacccataacataaacacctttatagttcattgtgtagggaatatctgctagcttcagtgcttgctcaatggcactattttgagaggattccatgtagtaacgttggatccgattgtactcttcatccgttgcaccgccaaaaagttcttcttcagaaaccaagtcttgaaattgattaaatttactgccaattgccgtaaaaacggttgcctgccgaataccgacactggtcaatgaaaacgagccatcgttttgatctttttggtcattgactgtaattagttctttcaaattgatcgttgccccaggctgttcaatataataagggattggtaaaaaggcacaggcggcaactactaatgctgcaacaagtaataaggtatatttaacggttgatttaagattcatgagcatcacgcttctttacgattgcttggtaaatatttggtggtaaataggcttccacatcgccaccgaaatgcaagatttcttttagcaaacttgaactaatataactgtatttggcatttgccaataaaaagactgtttcgagcgtcggatctaagtggtgattcatttccatgatatctcgttcgtactcataatccttgacactccgaattcctcgcagtaaaaattgggcacccatttttttggcagccgtaacggtcaattccgtctcttgcgcaacaacgcgaacattcgggacatgcgctagtgcctcagtgatcaattccactttttcgccaccggtaaagaagttgactttactagtattcacaaagacaccaatgatcaattcatcaaaaagggaagctccccgttcgatcagatctacgtgaccagcagtcaatgggtcgaaactgcccggaaataatgctattctcttcatcttatccctcatttctataaatcgtgactgccgtaatcccataaacctgccgtctactttggaccaatgtgccaatcctctctggcaaatccacttcttttgctgtttcgcaaacaatgaccgcatgagttgccataagatccgcttgtaccatttgttccagctgcaaaaccagctcttgcttcgcataaggaggatccaaaaaaatatagtcgaactgctgttgagtgcccacaaattcttttagggcttgtttggcatccatttttaaaacagtaaacttttcgggctcctttgtgatgccaatattttctcgaataatcttaatcgctggataactgcgatcgacacagatggcatgtgcggcgccgcgagaaacagcttcaatagctaatccgccactgcccgcaaataaatccaataccaagccgccatctaaataaggaccaatcatattaaaaatcgattctttcactttatcggtggttggtcgggtattatccccgcttaagctcttcaattttcttcctcgataatctcctgcaacaacacgcatatgcgttcctccaaaggttccataatttcttaaaaaagtattccagtgaccgtcatctttttgagcaacaaaaatgggtgcgattggcacccaaacttttgttatacattttctgccagtcgaatcgtcgtatttttttcttccacatcaaatccatcatcactcacttgatatgctgcgtcagtgccgattttttccgcaaaattcatctcaacatctggtcgatatgaaggttccacttgccgtacgaaatgaaattgttcgattttattttttttcatttcatagtcttcttcattcaagtacatgaccacatatttcattttgcgtgacacataatggacaaatccgaatctgcgtaaattttttaattggcgtaaactatagacccatacgatcagtccccgtcgtttttggatctcaaacgtttctttcgtctcctcttgcatgacaacttcctccacatgttgattttgattgaaaaaaaggacttccagcgtccactttgacttcctctgagaaacaatcagcaatcgacactgtgatctcatcaagcaagacttgcagctggttttcactgtgtcgaaattctccgacttgaggattcaaatcaagtgcccttttggctttgcgtaatgcccgctgctgttctttatacccgggagcaaacgtgccataagcagctattttttcaaaatcggtctttttatgtacaaatgaatcaattaatcccaatacttcttggtcttggtacatcgccttcttgttgtaacaataagagcgaaacaactgactattcttgatactggaaattaattgttcaatttggtcttcaattgcatataaatggtcattataaatcatctgatgtgctatcctctgtgtgttcattctcatcttcttggattaagactaccatatttgctttagaaaaagcaattcctatcttctcaggggtttgattcgataaaacattgtaaaccgaaggatcactataccatgataaaatcgtaaatgtcggatcgtagacaggtgcttcaaagatggaagaaacggttgaaatttccttttcctttaaaatatcctgccattcttcttgggtcagagtgaaggtgctggttcgttctgctgtcaatgctttttgataggcatgaatccgttgagatgttaaatgatccgaaagattctccgtgatttcttgaaggagatctttggcttcactatgagtatctaaagccatcccaaaactttccagctctttttgatcacgcattttttggatgatcacaaaagctaacgtttctttttcaagagcagctgtttcttggttcactgtttgagactcttgaaacagcggcagctccccttctgttaattgataaggagacagcttcaataatgtcgtttgatccagataagtgactgctgctaattccgatgtcttttgatcaaaaaacaaaaccgcgaaagtgccattgtcaaacgccactaagggacgatagttcatatcttgttccataagttcaaaactcactgaacgatcattttgactcaatgtaaaattcggatagatcatcgtaagctctgtaagatctgtcattgtcatcccaatcgaaaatggggctaaggatgcgccgccttggccaatcactttgattgcctgaacactttcgccgtcggtgttgatttcgagatattgttgatcatctaggtgattgtatacgcgaacttcaaagtcatatcctgtgcgatacgtgcatatcggcgagccaaaatcttcttcaaaatcagaaagaggttcaccgatcgcttttgctaagccatctgctttgattggttcataattcaaattggtaggcgcttttacaggattatcaaaaagaggtcttgaaggagaaacccgctgaaaaaatactggctgcagatagacgacgaccagcgccaaaataaacaagcagcaaaataaaattcctctacgtttcatcttcaagacctacttcctacttctctttgatttcgatcagcaaatcacctgatgtgatggcttctccttctgcaacatagacgtgttctaccacacctgagaaacgagcttcgatcgctgtttccatcttcatcgcttcagttactagaacggtttgtcctttcgctacccgatccccttttttgactaatacttgtagaacagaacctgacatcgttgcaccaatttgttctttatttgttggctcagctttgcgttttgtttgaacggagctgatgatcgaatgatctttgactaagatctcccgacgttgtccattcaagttaaagaacaacgtgcggttgccttcaatatctggttcgccgatttcatccaagcggatgatcaagattttccctttttcaagttcaacattgatcgtttcacctaatcgcatcccattaaagaatgttggtgtatctaggaccttgacgtcggcaaactgttcatatgcttttcggtagtctaaaaagacttgcggatacatcaaatagctcaatacttcttctgttttaggctggtagccgatcttttctgctaattcggctttgactttttcaaaatctactggttcagcaaacgcaccaggacgttctgtgaatgctggccgacctttcagaatgatccgttgtaattcttttggaaaaccgccgactggttgacctagttcaccttggaagaaagtaacgactgattctggaaaacttaaggtttcacctttatcataaatgtcttgttcagataacccgttttgtaccatgaaaagagccatatcgccaaccacttttgatgatggcgtgactttgacgatatcaccgaacatcatattgacttcatgataaacttctttgatttcgtcccatttttccccaagtcccactgcttttgcttgttgttgcaggttcgaatattgaccaccaggcatctcgtgtttatacacttctgtctgaggagcattcaacccattctcgaaaggatggtaatacatacgcacatcttcccagtaatgattcaactgctggatattatcgacattaatttctggacaacgttcgccgttgactaacgcatagtaaaggctactcatacttggctggctagttgctccactgactgcagacatagcaacatcgacaatatcgacacccgctttggttgcggcagagtaagtgatgatgccattgccactcgtgtcgtgggtgtgcagatgaattggtacatcaatactcgctttcagttcactgatcaagcgatacgccgcttgtggtttcagcaatcctgccatatccttgatcgcaatgatatgtgcaccaagattttgcaactccttggccatatccttataataatcgatcgagtatttttgacgagtcggatcattgatatctccggtataacagatcgctgcttctgcaattttgcctgcgtcccttactgcttggatgcttttttccatttgcggaacccagttcaagctatcaaaaattcggaagacatcgattccttgcgcagcagattctttgataaattcttctaacacattatctggataatttgaatatcccaccgcatttgatcctcgaaacagcatttgtaacaatgtgttcggcattttcttacgaaacatacgcagccgttcccatggatcttctgtcaagaaacggtaagcaacatcaaacgttgctccgccccacatttcactggagaatagttgaggaatcccctcttctgtcaacgcagcgatcttcttgaagtcctgggtacgaactcgtgtagccagcaagctttgatgcgcatcacggaaagtcgtatccgttagtaaaacatttttttgctgattgatccaacgaatgacgccatcagcaccttgagtatctaaaatggttttagccgatacgaaatcaggcaatgtctcaatctgttgcggaattcttggatcattataaaatggttttttttgtttctcgattcccggaaagccattgatcgtaatctcaccgatatatttcattgttttatttccgcggtcgcgaatgcgaggaaactcaaacaattcaggagtattatcaataaatgtcgttttcgcttcgccagaacgaaattgcggatgagaaacaacattgcgcataaagagaatattggttttgactccacgaacccgaaattctttcaagcagcgcatcattttttgaatcgcttgatcaaatgtcgctgcatgggtacaaacttttaccagcaatgaatcaaaatagggagttacaacggcgccagcataggcattaccaacatctagccgaacgccaaaaccaccaggtgaacgataagtatcgatttttccagtatcaggcataaagttattggcaggatcttctgtcgttacacgacactggatcgcaaccccttcaaagtggatatccttttgttgcgggattccgatttctttgtgcaagtctttcccttgagcaatcaaaatttgtgtcgttacaatgtccaagttagtgatcatttcagtaatggtatgctctacttgaacccgaggattcacttcgataaagtaaaagttgtctccttctaccaaaaactctacggttcccgcattgatatacccgacatgtttcatcaactgtaccgcagcttgacaaattttttctcgttgggcagcattcattgatacacatggagcgacttccaccactttttggtgtcgacgttggacagaacaatctctttcaaatagatggacaacattgccatgactgtcccctaatatttgcacttcgatatgttttggattactgatgtatttctctacatagacttcatcactaccaaatgccgctttcgcttcgcttttcgctcgttcgtaaccttcacgggcttctttctcatcgtgagcgacccgcatgccgcggccaccaccgcctaaggctgctttgatcatgattggataaccatgggtttcagcaaacagcaaaacgtcatcaatagtgttgacgggtccgtcggaacctggaatggattggataccagcctcgattgcagctgttttggctttgattttatcgccaaagatatccagatggtgtgtcgaaggtccaataaaaatcaagccttcttcttcacagcgttgcgcaaacgctaaattctcggataaaaatccgtaaccgggatgaatcgcttcggcaccggcctttttcgcggtgcgaataatatcttctatgtccagataggcttcaatggggcgcttgccttttccgacaagatacgcttcatccgctttaaaacgatggactgaatattcatcttctgcagcgtagatacccactgttttgatgcccaactctgcacacgcacggaaaactcgaatcgcgatttctccacgattagcgactaatacttttttcatcataccactccattccattgatcaataattcaaactatattgtttcctcttttcttctgcactaatgttcaaaataaagccgatacaaatcgacaacattaacaaacttgatcctccttgactcaaaaaaggaaaagtgatccccgttaacggaatcaagccggtgatcccacctaaattgataaagatctgtgacataaataatgtcccgatcccaatacacatcatggaattaaaggaatctcttgatcgaatgccaatcaaaaacattcttcctaccatataaaagagaattcctaacaaaacgattgagggaatcaagccaagttcttccatcacgattgaaaaaatataatcggtatgggcttcattcaagaagcctcgtttttgaatactatttcctaatccgcgaccaaataatccgccattgaacatggcataatatccattgaccatttgatgtcctgtatcaaattcatcggcaaaaggattggtgaaagcggcaaatcgattgtagatatattcaggcagaaatttcccacctgtcaaattgacaaaagtaatcgccaaaaaactaaagagaactgtggccccacctaatatcagggtatacacatagtttaatccgctagccagcaaaaccacaaaagccagcatgaaaataataacagcgttcccgaaatcgggatagaaggccaaaatcaccgtataagccaatacgatcgccattggtcttctcacagaaccccagaagtcttgctggatgccctcttggcgataagagaatgtgaccgacaagaaccaaatgataataaactttaagtactccgctggctgaacagagaatcctgcaatcgagagccagccccatgcaccattccttttttggaagaaaaaggcggcgatcaaaagaaagaaaataacgatcatggcaatttggacaaacttcttattgcgaaagacatcagttttcatcttgtacatgatcgtgatcataatcaaacttaccacccaaaaaacggcttgattgatcacataagctgctgaagtagtcggtggctttgctgtcattgcgacatatgaggtcgaactgtaaaccatcatcaaaccagttacgcataaaataaggtaaggtattaaaatgctatagtctaaaaggtgtctttttttaactttttctggcaagattatgcctccttgccgatttcagtagatttttgttcttcatatacttcgctatacaattgatttaggtctttttccagatctgccatcaattgttggccagcagcattgtctacaatacccaagcgtgttgcgaaagcgacttgtcgtgataagccatacatttgtgtgtcaacgacttcctcgaatgctttacactgagcaatacacaaactattttcttgattgcgaatcaatcgtttgattcgttcggcatcctctaaaagcagattcaatgccatttctgaatcaatctgcgccattctggtccccccatttcttagtttcattattatagcatattctataccgatttggcacagtaggatgccataaattcaaccgtaaataacgaacataaatttttttttgctaacaaaaaaagcgaattatcgactgatataaaaaaaagaagtattttcattcgtttttttctgtttcattgggttccgctttgctttgtaaatcgtgaaacacgaaccaattgtgaaacattcaaagcgattcacttaataaggaaaaagacaaaagattgatccagcagcctttattgaaaaaaaagaagtggaattgtccacatgttctttcttcctttcaaaaaaagaacaggaagcgcaccgcttcatgttcttttgattactactgtttctgcttttcaccgataaagccatcaccgttaatgtcctcatctgataaccgttcgacttctttgatgaatccctgactaagttcttcgtaagattctccaacaactgcgtcatctggaatttgatctaggttagcaaaaaattcaatatgattatgcaagttggtaaagatcatcggggcatcgccgccgtattcaccatctaaattgatcatcaaacgatcttttgcatctggcgcatcgacttctaaacgagacgtttttgtatagatcaagcgtcggtcattgatatgtttgccaccgttcatcatcaatgcaatcagatgaacgatctcaaaaatatttgccgttttcactatgatcagcgaaaatttcccatcgtcaagtttcgcatccggggcgatttgttcaaaacctcccactgaattcgtcaatcctaggaagaacatcgaagcgccgccaatatattctccatcgtcatatttaaagtgcatcttgattggtttgactcgcggcaacaattctgcgccttttgcaagatatgccaaataaccgaacacactcttcaactctgaaggaacatcataggtcaactcagtcaggtgtccacctgcagcgatattgataaaataatcccgatcagtttttccaatatccattttgatcgtttgttccttgagaatgacttctgcagcagccttcacatcgtttctaggaatcttcaatgcacgagcataatcattggttgttccgcctgggatgatcgccattttggggcgcttttttagcggagcgataccattaactacctcattaatggttccgtcgcctccggctgcaacaaccagatcaaatccggctctccctgccctactcgcttcatcgcgagcagagaatgggagagcagtcgtcgcaaaagcactggcttcataaccggctttctctaagacttctaatatatcggcaagatgtttacgaatcagttcttttcctgatgttggattataaatgactctggctcttttcatattccgcctcttatcgttttgctaattcttcttgaagtaatttgttcacaacgccagggttcgcttgtcctttagttgctttcatgatttgaccaactaagaacccaactgcccggtcttttccgttcttgaagtcatcaacagattgttgattcttatccaagacttcattgatcattggcagaagttgtgctggatcggatagttggatcaatcctttcgctttgacaacttctttggcatcgccgccattggtgatcaattctttaaagacttttttcgcaatcttagaactgatcgttccatcagcaatcagttggatcattcctgcaagattatccggcgttaatttggtttcttctaattccaatttttcactgttcaagtaggccgaaacttcacccatcaaccagtttgatgcttgttttggttccgccccagcatcgatggttgcttcaaagaagtcggacatttctttggtcagtgtcaagaccattgcgtcgtattctggcaatccaagttcgttgatgtaccgttggcggcgtttttgtggaagttctggcaatgtttgccgtactcgttcgatccattcgtcatcaataacaaatttaggaatatctggttctgggaaataacggtaatcagatgatccttctttgacccgcatcaagattgtcttattagtggtttcatcaaaacgacgtgtttcttgttggatctcaccgccagaaagcaatacttttgcttggcgtttttcttcgaaagccaagccttttttgacaaaggacatagagtttaggtttttcaattcggttttggtaccaaaagcttcttgaccataaggacgtaaagagatattggcatcacaacgcatggatccttcttccatcttcacatcagatacttctgtaaattggatgatagagcgcaaagcttccaaataagcataggcttcttctggcgagcgcatatctgcttcagaaacgatctcgatcaacggcgtgccctgacgatttaaatccacataggaatagccgccgatgccatgcatatttttccctgcatcttcttcaagatgaacccgctcaatacggatttttttctttttgcctgctacttcgatctcgatccaaccatcatgaccgattggttggtcaaattgagaaatttgataggctttcggattatccggatagaaatagtttttgcggtcgaaatgagtatctttggaaatttcacagtttaacgctagtgctgctttcatcccaaattctaacgcggctttattcatcaccggtaatacccctggataaccccagtcaatcacattcgtattgctatttggctcggcaccaaaatgtgctggcgccggtgaaaagatttttgagtttgtttttaattctacgtggacttcaagcccaatgactgtttcgaagttcatgcgttattccctcctaaaatcactggttttttcgtatgaaaatcagttgcttgttcaaacgcataagccgcttgatacatcgttgcttcatcaaaatgtttaccaatgatttgcaaaccgactggtaatccttcagaaaatcctgctggtacagacatacctggcaatccagccaaattgactggaatcgttaagatatcattcatgtacattgtgattggatcattgatattttcacctagaccaaaagcaacggttggagatgcaggaccaataatcaaatcgtaatcagcaaatactttgtcaaaatcttgtttgatcaatgtacggacttgtccagcctttttgaagtaagcatcataatatccagcacttaatgagaatgtccctaacatgatccggcgttttacttcttctccgaatccttcactacgagaattgacatacacatcgtctagattttttacgttttctgaacggtagccataacggattccgtcaaaacgttgcaagttagagcttgcttcagaagaggcaataatataataaacggaaacgccatatttagaatgaggcaagctgacttcttcgactgttgctcctaatgctcggaatgtttctgccgctttcaacacagcttcacggacaccaggttgaatcccctcacccatatattcttttggcagcgcaactttcatacctttgatatcgccagttaaccctgcagcaaaatctggtactgctactccagcagaagtgctgtctttggcgtcaaatccactaatggcagacaatgccagtgcattatcttttactgaacgagtcattggtccgatttgatccaatgaagaagcaaacgcaatcagaccaaaacgtgaaacacgaccatatgttggtttcattcctacgattccattgaaagaagcaggctgccggatcgaaccacctgtgtcactccctaatgagactggtacttgcccagcagctactgcagctgcagaaccaccagaagaaccgccaggaactttggtatgatcccacgcattctttgtttttttgaagtaggaagtttccgtacttgctcccatggcaaattcatccatgttcaatttaccgactggtatcatgtctgcttggtagactttttccatcacagttgcatcatatattggttcaaagttagccaagatcttagatgcagctgtagtcagtaggtctttggtcacgatattgtctttgatcccaatcggaatccctgccaaaacattgctttcagaaatacccttctcatcaattgctttggctaatgccatcgcgtttgactcgttcaatgtaataaaagaatccacttttggttcagtcgctttgatttgctcgaatgtctctgctgtcaaatcgacagctgaaatttctttggaaacaagcatgccatggagctcttccaaacttttacttactaattctgtcattacgcaccggcctccccattatcaataattgctggtactttaatgaaaccatcttctgattccggcacattacgcatcaattcttgtcggttccagccttctgctgcgatatcttcacgcatcacattgattgtttcagcaacgtttgatgtaaatggcacaccttctgtgtctacttcctctaaggtttctaccatatcaataatttttcctagctgagaggtaaactcatgtaattcatcatctgagaatgataattttgctagcttggcaacgtgtttgacttgttcttcgcttatcgccataaaatcctcctctttctcgcatccataaaaatacgtttacgtttttccaatgtattgtatcacttttccagcaaatcatgaaatacattttgaaaattatcatacttaattgaaaatgtaggtctcgattttttctgccccatctttacgggcaataaaagcttgctgtttccctagagagccaacttggacttcgatctcgccaggaactcctttgaagacagattcgacttgctttgcgctatactgaacaaaactggtgatctcggttttactgtaataattcgactcgactttcaaaacaagtttttggagttgatcatctacgtaatacgcattgccggtcacaccactcaagtcaggaaagaaactaatgacagcatcacgaaatgttttgaacttattatccaaaccatcatcggtggcagcattggtgacccccgcagctacaggtaaaataatgtgggcctctgctactttctcatactgatcgatagttgttcctccatcttggctgactgcttgataaacataattgcctccggcgatatcatctttagcagcttgttcgaataaaccgatcacgataggtacagtctccaaccctttgatttttcttacttgtgtcaaaacagcattgactgtcttccgcgcgtttgccatccactcatcacgagagatagaaatggtctcgtcgctgccatagtagacggtattaaaggcaaagcctaaactaatacctgccaatgttttgccgtcttctttaataaaatcttgctccatcaattgttgaaaaataagcggctgatctgaaccggcagggttaagaccttgcgggttatcatcagagacacgtttcagccaattcttgatcgtatcagcaggaattttttgaccttcttgaaagtagcacgtatcgacagaaaaagtctgcttggacagcctcagcaagccattctcaaaattggtttgattgaacccgctgttcatttgctctgcattcaatcctctagcagcactcggttggtacttgccgtctgtcatgactgcctgatagacagaattatcgacacggccagtggtaatattaccgctggccgtctcttcaccttcgttgatattcgtgattcctttgttgagattgccgcaacctgacaaaaagcttaacgacatcgcgacgatcaagaagtgtttaatcttcatggttatggctcccttcaatcgctgccaccatttgattctcttcccaaactgtaatgcccaagctttgcgctttcgtcaatttactaccagcctcttctcccgctacgacgatatctgttttctttgagacacttcccgtcacttttccgccaaggttctcaattctttcctttgcttcttcccgagtgaaatgagtcaactttcctgttaagacaactgtcttacctttaaagggtgagtcaatagccgagagctcctcattttttaaaccaaggtaatcaaaattgacccctgctttctccaactcatctaaaagatcatggacttcttcgttgttgaaataagtgacaacactatccgcgatggtttgcccaatcgtttctaaagaaacgatctccgactcatccgctttgcttagattacgcagattgcgataatgttccgcaagaattcttgctgctttagatccgacatggcgaatccctaagccaaatatcaaacgctcaacagaattttctttactggcttcgattgctgacaaaatattgtttgccgatttttctttgattttgtctaatgtcaacaattgttcttccgtcaaataatataggtctgcaacatcagcaactaagtgcttttcatacatttgttcaagaactcgtgggcctaacccttcaatgttcatagcatttcgggaaacaaaatgactcaatccttctttcatttgtgcaggacacttcggattgatgcagcgcagtgccacctcttcatctaaatggaccaattcactgtcgcaaatgggacaatgggtaggaatcggatagggctcactggcttttgaccgcttatccgtcaatacgttggcaacttctggaatgatgtctcctgctttatagataatcacagagtcattcaagcgaatatctttggcgcgaatataatcgacattatgcaggctggcacgacttactgttgtaccagctactcgaaccggcgtcatgaccgctgttggtgtcacaacacctgtgcgtccaactgtccattcaatctcttcaatggtcgtttctgcttcttcgggtggaaatttataagctgccgcccaccgaggagctttaaccgtaaatcctagtgtatcttgatcggagaagtcattgactttgatgacaacgccatcgatttcataaggcagctcactgcgtttttcgtgaaattcttcgatatacgcccaaacttcatcgatcgttcggcacaaacgccgttcatgatttgtccggaaacccaaactgtctaattcatcaagcgctgagaattgatcgtgtgcctcgataggaccgaaatctgccagagtatataagaatgtgctcaaattacggctggcagcaatccgtgtatccagttgccgcaagcttcctgctgcggcatttcgaggattggcaaatacctctaagccctcttcttcccgtacttgattcaaacggatgaaagaagctttaggcatgtaacattcgcctcggacttctaatgaaacaggttctttcaattttaatggaattgacttgactgtcttcaagttttccgtaatattctcgccgactgttccgtcaccccgtgttgcaccacgcacaaaccgtccattctcatatttcaaagagattgatagcccatcgatcttcaattcacagacataatcaacggcacgacctagcgctttttggactcgcgcatcaaaagcgatgatttcttctttatcaaacacatcattcaaactgtacagaggaatatcatggatgaccttttcaaatccaggcagaacgattccacccactcgctgagtaggagaatcttctgtgaccagctgcgggtaatccgtttctaattgaacaagttctttataaagtcgatcatagacgtaatcttcgacagacggctgatccttcacataatactcataggcatattgattcaaagtggttcttaattcttccgctcgttgttgaacttcagttgatggcacagccatttcgattcctccttatagtttttcgatcggagcaaatgctgcaagcagccgttttactccttgttggggaaaagcgacatctaattctagatcctgggcggcccctgtggtccgaacgatcgtgccgacaccccattttttatggttgactttttcccccacttgccattgattgccggctgcagtcgtggtttgtctcgacgaaacagtggactgacgaggttgggtatacgttggtttgaaaactttaggctgaaaggaagcagctgcccctttcggctgagttctttctcccagtgactgcagaagatcttgttcaatctcttccacaaaccgagaaggacgattgtattgagtgcgtccatacaatgtacgagaaaatgcgtttgtcaagaatagctcttcttctgcacgagtaatccccacataagccaaacgacgttcttcttccagttcgctttcttccatcaatgctcgagataacgggaagatgttctcttctagcccaatcaaaaagaccacaggaaattccaatccttttgccgcatgcaatgtcattaatgtcacttgactgctttcttcttcataggaatcaacatcggaaagtaaagcgaggtcattgaggaagacagtcaatttttcttctggcgcatcggcatcatcttcattttgtgcctcaaagcgtttgtcaaattcttgggtcactgttaagaactcttccaagttctccagccgggattgtgattccagattgttctgattgatcaaatcttgtttgtaacctgttttatccaaaatttctttcgtcagttctgtcactgacagataaggaatcatttgggcaaactggtccatcatcatgccgaagctaccaagttctttgccggccttgcctgagatattggctaaatcgacattcatcgcagcttctaacaaggaccattcatgaagcgaagcaaactcacgaagtttttcgacagaagtcgccccgataccacgtttaggcacattgatgatccgttctaggcttagagaatcgcttgggttagcaatggccgaaagataagccaagatatcacggatttctttccgatcatagaatttgcgtccgcccaccattgtataaggcgcgtttgcttttaatagcatttcttcaatcacccgggattgagcattggtccgatacaaaacagcaaagtcgccgaatttacgtcctttatctgcaatttgtttttgcatctcactgacaataaaacgagcttcatctcgttcactatccccgcgatagtaagtgattttttcaccggctctattttcagtccacaaatttttgtctggacggttgcggttgtttttgatgacttgattcgcagcattcaaaatcgtctgagttgagcggtaattttgttccaacaaaatcactgctgcatccggataatctttttcgaagtccaaaatattttgcatattggcaccccgccagccatagatactttgatccgcatctcccacgacacaaagatttttgaagcggtccgctaataaattaacaagcgtatattgggcatgattcgtatcttggtattcatccacatggatatagtgaaattttcgttgataaaactgcagtgcatcttcattttccttaaacaagcgaatggtattcatgatcagatcatcaaaatccatacattgattatttcgtaattccttttgatacagcgcataacagcggcctacgatctgttcaaacaagctcccttgttgattttcataatctgccggagtcaacaattcatttttggcattggagatcgctcctaaaatggaacgcgggtcatatttttttggatcaatatttaactcttttaagactcgtttcatcaaagtgttttgttcagaggtatcaatgatcgtaaagtttctagagtagccgatctgatcaacatctcttcgtaaaatccggacacacatcgagtgaaacgtagagacccaaacatcttctcccccagatccaagaagctgattcacccgttctttcatttctctagccgccttattcgtaaaagtaatggctagaatattccaaggattgacatttttttcttcaatcaaataagcaatccgatgggttaagacccgcgttttgccactaccggctccggccattaacaacagaggtccttctgtatgcatcacggcctctttttgccggggattcatattcgcaagtaattcgtttttggatgacatggttttaaccatcctttctttctcaatccattcaattatagcattatccgattgtagggaaaaccgaacgccttgaaaagttgctaaatttttcttttttgtccttcaaaaaaattccttgttatctattcaaaaaagggctaaattaaataaggaaagtgaggagtttgatgaagaaacatgaaatccattatttagatacaacccgcctggcctttataggcaaaggaatcttgataggagcatttgtggggatcgtggttagtttgtttcgccttgcgattgaatggataggcgaaaaagttgctgctgtctatcgacaccttgctgatcatccagatcagatcatactgtgggtaattctctctatcatcactgtaattattgtgatccttttagtaaaatcagaacctcaaatcaaaggcagcggtattcctcaagttgaagggaagttaagtggcgagatcgattataattggttctctgtcctttggaaaaagtttatcgggggcattttatccgtcggatcgggtctttttttggggcgggaaggtccttcgattcaactaggtgctgctgtcggacaaggtttaagtcagttctttgaagccccaaagtcagaagaaaaaatattgatttccagtggtgccagtgcaggattgtcggcggctttcaatgcaccgattgccggtttgctgttcattttagaagagatccatcattccttttcacctcttgtatggctgacatcttttgcttcagtgatttctgctaactttgtctctttaaatttttttggattgaaacctgtcctttaccaaggaaagatcaatgacttgcctttgaaatattacggtgctttagtcatcttaggtatcttactagggatcttaggacgattttaccagtggacattgctgtctttgcctaaatggtatggaaaactacccatatcctctgactggtatggattgattccttttgtgctgattattccaatcggtctatttttaccagactatttaggcggcgggaatcaaattatcttgactttaggagaaaccggggctcccctgttgtttttggtcatgttgctgattttgcgttactgtttttccatgatttcatatggagctggactgcctggggggattttccttcctatcttaacattaggtgcgctgattggtgcgatctttggtacctttttggcacagtcgatcggtctggatcctatttatatcaagaatttcgtgatcgtagcaatggctggttattttacagcgatcggtaaggctcctttaactgctattattttagtaacagagatggttggatcaatcaatcacctaatgccgttaggactagttagtttagtagcttatatcgtggtcgatggtcttggtggtcatcctatttatgagtctctccttgaaaagatgcataaagaacccgctgtgaatatccgaggaacgaaaacagtgatcgagtatccggtaaccgcagaaagttcatttgatgggatggccgttcgagactttccttggccagaaaacatgttgctgatttccattcgtcgtggcgaaaacgaaattttgacccgcggagatacgatcatgaaagttggtgatgcccttttgatcttaacggattcgaatagtgtttcggaagtgaagaaaaaaatcagctatttagctgatggtcctctgacttaaacattggctgccaaattgccgtcaacatcctcctgtctttatttatcgatcagaaaaaaatcgaaggagcaaagctacagacacatgttctgcagttttgctccttctttcattgccatacaatcgctgtcgtataatattcccaaccgttctttctaaaatcagcttctgaaattagctatagtatttttccaccaaacgttcatccacataaacggaaacttgaccgtcattgactgggaaaattcctttacctgtttcgtctaagacaacttttgcttcattatttttcaaaatatctacgtaagtttcaccaccatgaatggcgctgatggtcatttctttctcagcaccttgggcattcgtcatgaccacggccaagccagacagttcgtgctcataatctcctgtcagtacccaaccgatacaatttgggtcatcgaaataatcaacttgattgccaaaggagattttttcacgcaatttcaggagattttctaaattttctccaactggttcaataccttgttcaggaataccgaatagatccccccagaaaacaactggtactccagcttttcgcaacaagatcaacgcataggcatgcactttaaaccagccatctacccatgactgtaaactctgaccgacttgcgtatcatgattatcgacaaaagtcacagcgtagtcttctcgagaagcagtcaatgtacctgcaaagatttgactcatatcgtacgcaccattcgaatgagatgcttcatagaaattgtaatgcagtggcacatcgaacagatggatcagatttccggaagaatcgagatactcttctagtttcggcagatcacccgaccaatattctcccaccacaaataaatctttgcctttttcttcccggcgattcaaaagccaattaacataataattaaactcaatatgtttgacagcatctaggcgatagccatccacattcgttaactcttgataccatttgccccatttatccagctgttcgatagtttctggattctccatatccaaatcacagcccattagataatcatagttgcccatctcatcatccacttgatcttcccaccctttttgggcaaagttaaacaaggcatgatcgttggttcggtcatcataatcaacgccagaaaaatttttccacgtccagacatagtcattgtatttcccttttcttccagggaaagtgaacttcgtccaagcttcgatctcttcttcatcacttatcggcttgttgcgattgtcccaactgtatttgaccgctggtgccgtttctttttcatcggctcctatcaaatgattgaatacaatatctgcgtaaacctccaacccctgatcttgcaacgctttgattgcctcaagatattcatctttggttccgtacttggttggtattgatcccttttgatcaaattctccaagatcgtagtagtcgtagacaccatagccaacatcttcgacgcccgctgtacctttatatgcaggaggcaaccataccgctgtaaatccataatctttaagctcactactcatttctttcaatctattccaatgttgactgtctgcaggcaagtcccattcgaagccttgcaatatcacttcattcttcatataattcccccctaaaaataattaagccaaagaatagccattcttgtcaaacattaacccatttcgattcttttctgagtaatttgccgaccgtttttgaccgtttaagaatgtattacccttacattttgattgtttttaaacgattgtgattgattatgactgttttatgtgctatcataacaattgaagaggtgatgtaaatgcttacagaagagcgtcatcaaaggattttagcccttttagaagaaacggatatcgtgaaagtcagcgaattgatccatcaattacaagcatctgagtccactatccgtcgcgatttacaagaacttgaagcacagggagttttggtccgaatccatggaggtgccaaaaagatccagcaccttggatttgaacccaatatgaaagaaaaaacgcaaaagttccaagtagagaaacaaaaaatcgcccaatatgccgtctcattgatcaaaaaggatgaggtcatttacttggatgctggaaccacaactttagaaatgatccctttcttgtcatcgatctcaaatgtgaaggttgtaaccaactctgtcaaacatgcggcattactgatcgatcaaggaatcgagacattgattttaggaggaacgatcaaaatcagtacgaacgctgtcttggggagcggtgccagtgagcaattgcgaaaactgcgcttcaatcgctgttttattggaatgaatggtgctcatgtagacgcaggctttacgactccagatcctgaagaagcaatgatcaaaaaaatcgcgattgaaaatagtcaaaaagcttatgtattactggaccattctaaatttcaacaaactacttttgctcaagttgctgccattgaagacgcagagattatcacagacttctgtccgaaaaactatgcggctaaatttcgaacacaaacgactattatggaggtatccgaatgatttatactgtcacactcaacccatcaattgactatattgtccacgtcgaagcattacaattgggcgaacttaatcgaatgaagcaagactttaaacttcctggcggcaaaggcatcaatgtttctcgtattttacagcggatccagatcccttccactgcacttggatttattggcggattcactggacgtttcattgaagattggctgatcaatgaaagaatcacgaccgatttcacacaagttgctgccgatacaaggatcaatattaaattaaaatctggcgaagaaactgaaatcaacggattagggccaacaatctcaaaggatgaaagtcagcaattgaaagacaaactgtcttctcttaccaaggaagatatcgtcattttttctggtagcaaaccaaatggactgacggctgactactatcaagagttgatcgccatcgtcaaagaagctggagccgagttcgtcattgacacaacgggtccagagttgttcgcagcattacccgaccaaccgttgctgatcaaacccaacaatcatgaattagcggaattgtatcaaacgacattccactccttcgaagatattttaccttatggacaaaaattaatcgctgatggcgccaagaatgtcattgtctcccttggcggagatggagccattttctttactggaaacgaaatctaccgctcgaatgttctgaagcgttcactgaaaaactcggttggagctggcgactcaatgattgctggctttatcggacaatatacagcaacaaaaaatgcactggaagcctttaaatggggagttgcttgcggcagcgccactgctttttcagatgatttagccacatcagcatttattcaagaattattgccagaagttgttattgaaaagatactttgacttaacataaggaggataaacaatgaaaatcaacgatttactcttaaaagatgccatgatcatggaccttcaagcaacggataaaaaaggtgtgattgacgaaatggttgccaaactttatgaagttggccgcatttcagatattgctgtctacaaagaagggatcttggctcgcgaagcccaaacatcaaccggtcttggcgacggtatcgcaatgcctcatgcgaaaaatcaagcagtcaatgaagcgactgttttatttgctaaaagtaaaaccggtgtggattatgaggcacttgatggtcaacctacttacctcttcttcatgatcgctgctcctgaaggagctaatgatacccatttacaagccttagctgctctttcccgcttgttgattgatccagaatttgttgagaaattaaagaaagcaccaactgcggatgcagtccaacaactatttgctgaagcagaagtacaaaaagaagaacagacagatgtcataactacagagtcagtgagtgatcgcccttatatcgttgctgttacagcctgtccaacaggtattgctcatacttacatggctgaagatgcattaaagaaaaaagccaaagaactaggcgtagaaatcaaagttgaaacgaatggttcggaaggcattaaaaatcgattaacagaagaggacattgcacgagcagctggcgtcattgtcgctgctgataaaaaggtcgagatggatcgtttcaacggcaaacatctagtgaatcgtcctgttagtgacgggattcgtaagacggaacaactgatcaatgaagctttaagcggtgatgctcctgtctttcacagtagcggacaaacagttgcagaagaatcttctgctgatggtacgtttggtcaacgaatctataaagatttgatgaatggtgtttcccatatgttgccattcgttattgcaggcggaatcatgatcgctatttcctttatggtcgatcaattcatgggtgtaccgcaagacgctttaaatcaattaggtagttataatcaacaagctgcttggttcaatcaaatcggtaatgccgctttcggattcatgttacctgtcttggctggatttattgcatcgagtatcagtgatcgcccaggtttgatcgttggttttgctgctggcgcattggcaaacagtggtggcgcaggattccttggtgcattgattggtggatttttagcaggatatgtcatcaaattcttgcgcaatcttttcaaaggtttacctaagtcattagacggaatcaaaacgattctcttttaccctgtttttggtttgttgattactgggttcctcatgctaatgatcaatgtcccaatgaaagcgatcaatgacggcttaaacagcttcttaacaggattgagtggaacaaatgccgctttactaggtgctctgttagcagctatgatggcagccgatctaggtggtccaatcaacaaagctgcctatgtgttcggtacagcaacacttgccacaacggttgccgaaggtggtagtgtcgtaatggcctcagtcatggctggtggaatggtgccgccattggcgatctttatcgcaacagttttattcaaaaataaattcactaaagatcaaaaagaagcaggtttgacgaatatcgtgatgggcttatcttttgttactgaaggtgcgattccttttgcagcagctgatcctcttcgggccattccaagtttcgtgattggttctgctttaactggtgccctagtcggtgcattcaatattcaattgatggctcctcacggtgggatctttgtggtccttttactatcaaaaccattattattcctattgttcatattaattggtgcgattgtttcaggaatcatcttcggtttgttaaaaaaagaagtaactaccgcttaatacatgttgtgtgaaacaactagcgtctcctatgcaaaaaaatctccagcgtgtttgaaacacactggagatttttttgcgagaatcattcaacttccttgtctttgctattttatatggctctatttatttccagaaatggattggtgttcagctaagcgttccatattcataaaatagacccgcaagcgatgggtttctttttttagattgacccaggtatattttttgctgcgatgcaataaaccaaagcgaacatctgacatacgatctttcaattcgtcgataggaatatctgtcatcgcctcttgcggcaaatagaactgcaaacaaacggtgtattcttcaaaatgttccgtagtgtaatccgcctctaaatgactgcgaatataaaattcataagcatctaagccattatcgagcgttaactgtggttttaagacaatgtaatccatcatccgcatgccttcttggtcgatccaagggaaataagcctgtgcattcaacaatcccctcacccgacgttcttggtaaatctcacgaactaaatcaaagttccgagtgataaaatgggtcgctttgcgtttgacggtgggctgtaaacgatcattttgatattggatcgtttggatcaactgatggccaaacgcgtattcaataaacggttctcgcaaaatccctactccgttatcccaagtaagttgatccaccccgatttggtcccgaaacaaacgttgataggaaaggttggcaggatgatcccattgaaacggatcacggtaaagctccaccatgacaaccccttcctccatcgtttggatttgttctacttgttgggcatctttaataatcactaacggcaacactcgctcatagtactctgagaaatacatgcgccaacaggaagttaaacaaaacccgttataaaaaacatcatatccggcaaattgattgcaatcgatcacgatttctttggcatggttttttcgctttggtaattcagcgatttcttctggtttctgaaagttatagcgtttctctacactttcgacattatgattgaggaattcatcataagctcgaatataactaaagagaccgccttgttccattgtggtctttatataactcagtaatagttctcgcgatccctgaaaaacatcaaatgtaaaaagatgtcgttgcagtacggcttcttggacaacgtgtatactggattcattttgtccatcggttaaaatcagttcaaaattgacctcgtcaatacttccctccagcaatgagcgtacttcagcgatatcataggagtggatttccttttgatttaaatagtagctggtgggggtaaaggaaagacggaccaaagcgaaccagttggctatttgttcacgcatcagagcatcggcgagttgtgccgattgaataaaggcatagattttcttcgttttgatcatctttctcacctctttatgtacttcttattttattatagtaaagggattcatgattgaacactatttcgcttacttttgagatgaaaaactttggttttcatggtaaactagaggcgcttggaggtgggaatatgggattaaaattccaacgtgaagattctcttgataaaatgttcgatgtgtttgctattcttcccgacaatgacaaaaaagagaacaaacccgacatcgaacgcttcttgaatgcgaaagaagataaagaagaaactgaaaaaaatacggatcttaaaaaacaaacaaaaaaaacatcctaatcgatgttttttttgtttgcacagaatttttccgataaaagatgttccggagcaaactttctccgtttattttctagtcctgagagattgccccatgcatcttacctcttatctattattgcttgatggccgcttctatcgcttgccaagcttcttctttcccctgtttagtgatggaagaaaaaagaataaaggtgtctgctggatcgaattccagcgcttttttgatcacactttcatgcttgttccatttcccgcgaggaatcttgtctgctttcgtggccaccacgattactggaatctcataatatttcaaaaactgatacatttgaatatcttcctgagaaggcgcatggcgcagatccactagagagacgactgcccgcagctgctgtctctctgcaagatacgtctcgatcatcttcccccactttgcccgttccgtttttgaaacttttgcatagccatatcctggcacatccacaaaatgcaaggtgttttcaatcaagtaaaaattcaatgtttgggtcttaccaggtttcgaagacgttcgcgctaaattttttcgattaatcaatgtattgataaaggaagacttcccaacattggaacgacccgctaacgcgatttccggtaaatgcgtatccggatattgtgccggtgaaacagcactgatcacaatttctgcatcatgtactttcatctgctcgctcccttctaataaaatctcatatgctttcagaaagaaagtcggatagtcatcaaactatccgacttactaaaatcaaactgctttttttgtttcttcattataaatgattgtcggttcaccgatttctttggctgcatcttcggtaataatgactttttcaatcgactcatcagaaggaacattgaacatcacgtccatcatgatattttcgataatcgaacgtaaaccacgagcacccgtattgcgttcgatcgctttatccgcaatcgcgcgtagagcagctggttcaaactcaagctcagtatcgtctaatgctaacagtttttggtattgtttgactagcgcatttttcggctccgtcaaaatacggaccaagtcatcggtcgtcaatttgtctaaagctgccataaccggcaaacggccaataaattctgggatcaagccgaatttcaacaagtcttcaggaatgatatgttgcatgatgctttcatcttctgagaaccgtttgttgttcgttccaaaaccgatcgttttttcacccatccggtttttaacgatggtatcaatcccgtcaaatgcaccaccaacgatgaataaaatattcgtcgtatcgatttgaatcatttcttgatgaggatgcttccgtccaccttgaggcggtacacttgcttgtgtcccttccaagatcttcagcaacgcttgttgcaccccttcacccgatacatctcgcgtgatcgaaacattttcgcttttacgagcgattttgtcgatttcatcaatataaatgatgcccttttctgccatttcaacgttatagtccgctgcttgcagaagtttcagcaaaatattttctacatcttctccgacatatccagcttccgtcaagctggtggcatcggcgatagcaaatggcacattcaatgaacgggccaatgtttgagcaaggaacgttttcccagagccagttggtccaattagacaaatattgcttttttgcaactcaacgtcttctgcggtcggctcaacgttcactcgtttgtaatgattgtaaaccgctacagcaagtgtctttttcgcacgatcttgtccgatgacgtaatcatttaatatatgcagcaattcttgtggtttaggtacctcggtaaattcacgaatggcttcttcgtagaactcttcgtcaatgatctccttgcacaagtcgatacattcattacatatgtatacaccaggaccggcaacgatcttctttacttcctcttgcgtcttcccgcaaaaagaacaacgaacagcgtcatttccatttgtgttgtcgtacatactgttcaccccttgataaatttctaacctgtaaaggagtggaattggttttactatctttacagtctttaatcatcttatcataactcatttgaaagaaaaagctatttctcatggccgttacgttttcttagcaattgaccacgtccgcaaaataagtcaagatcctcctgctcaaaaaggcaaagtaagcaaaaaacgatcgtatgaaatatacacaccattgctttttgatcaatcaaaaagggcaaacatcggaaaagacgtttgccgctcttttgatgaaaattaagcttctttcgccgtaccagttacgatttcaacggctttcttcattgtgatgtcatgtttcaacatatcttctgtcaagacgcgtttgatttgatcaacaggcatgttgtaagcttctgaaagctcttgaatttctttttcgatgtcttcttcagttgcttccaaaccttctgcttttgcgattgcttcaatcacaaggttagttttcacacgagtttctgcttcgccttcaaattgttgatgcaagtcagcttccgttgaaccagtcaattgatagtacatttctggtgaaattccttgacgttgcatgttgttcaagaactcatccattgagcggtgaacttcgtcatggaccattgaatgtggtaattcaacgatttctgcgttttcaactgcttggcgaatcgctgcttcatcttttgcatcttcagcagctttttcttttgtttctgtcaattctttgcggtatttttcttttagttcagcaagtgtttcaacgctatcatcaacatctttggcaaattcatcatctaattcaggcaattcttttgctttgacttcgtgaactgttactttaaagaccgcatctttacctgctagatcttctgcttgataatcttcagggaaagtgacgttgacttctttgctttcgccagctttcactcctactaattgatcttcaaaacctgggatgaaagagttagaacccaattctaatgaatagttttcgcctttgccgccttcaaatgtttcttcacctaagaaaccttcaaagtcgataacgactgtatcgccattttcagcagcttcgtcttctttgatgactaactcagcttgtgcttcttgttcacgtttgatgcgagcatctacgtcttcttctgttacttcacgatcttgtttttcaacagtcaactctttgtaatcaccaagtttaacttctggtttcacagtcacttctgctttgatcacccagtcttgacctttttccatgctgtcaacatcgatttttggttgtgatactggatcaataccagcttctttaactgctgcttcataagcttctggcaagacagcattcaatgcatcttcatacaatgcttcttctccgtacatacggttaaatacttggcgagatacttttcctttacggaagccaggtacgtttaagttgcctttcactttattaaatgcagtcgtcaagcctttttggatttcagcttgctcgatcgaaaatgtcaatacaccatcattggtgcctgttttttcccattttgcagtcatttatttccctccgaataacaattatattttacatatgaaatagtttcatgcatacctttaaatagtacactaacgttctttaattgtaaacattttacctagaaacttctcgtttttttcttgagtgatctgctttcagaattagaaagaacccaaaatctttcgtaatcttgttttcttacgttggatctcctcgtcgatcgcttgtggttcgctttttgcaaaaagatcttgatactcatcgatatagctttgtacccagcgatcaatctcttgggtttctggcaagaacggatagcttaaagcaaaatgatcattcaactcttctaaaatgccttctgctaaggttggattttcttgcccgattcgttcattcacagcttgtcgcatttggctgaaaactggcacttccctcaataaagataactgattgggaatgatctgccgttgatcccccatgtagtctatcaattcaaactgctgtgaacttcctaaacggacaagttcttctactagttttggtaacaaaaaaggattcgttaactgaggaagcagctccgtcatcaacgatacaaactgatcctttgtgagtccttgggaaaaaacgtgccatgtgtgcccgctaactggttggttgctgctgtccattgcaagcaatgactgtttttttcctaaaaaatcttccaaaccaagtatttgttgaacttcttctactttatccaattctttcactaaagtttcgcttgccgcttcagagatcaccggaaattcctctgcgagtcttatccattttctcgcttgcaagtattgaccatcaagaatcaacaaatgaccaatttgaacaaaaccatttggatcttgtaggtattcatccaagaaatcatctgccacttccaacgcttttgcaaaatcagccagttgctgtaagcacttaacgagagactgattgatctcaaaagaagaatgctcagtataaatttcctggtaatcatggtaagccttcagataatcttttgcctgatatgctttttctgctgaatgacgcaggcagtcttcaggttttggaaactggatcgtgtctcccatatctcattctcctttatctgtaatcgatctgcaatcgcacttccgcttgtatggtgcaatcttctggtagcaagaccgcttttcaacgggtcagtcttcgtttgcctcaaatagagactgaccgctcattacgctattgtctattcttgttacatattggcatttgcctgtttattgaatgctttaatcaaattgatagtaaccacactggtctcagaaaaataatctccggcatgctgcttttctttagtaaaaatcactggcaaataaccgcaataaaagaaaggattgaattgcaaaacgtagcgcatacacagttctcttgtcagaactgttttccaactcaaatcagcttctgtaaatgacacgacccgaataccgaaaatcatcttacctaccgtttgtccctgattgaactttgttaataaaacaaaatagcctaagtagatggccaacgagagtaactggtagagtccaaaaggatgcccgctacttgaccaaccacctaagtgatagatcgtatccagagtaattcctgtaatagctccgatacaaagtacatctacgagataagcaaatagccgaatccaaaacccagcaaaaaagtaatctggaaaatcattcactcgtctgcgttctttctgtttgtcttctatcccctcataccgttgccattctttttgtcgctgatcaatctcttcctcgctaaattcttttctcttaaacgagcccaatacttgttgatagaaatcatctggatgattcgtcacagcggcctcttgatttggggtatccacagctagttgtgcttcttgattcgcctgctctgtagagattccagaggtcgactctagattttccagagttacgttttctgctccctgttcaacaggttgttgtttgattcgtggctctttcgtttctttttcaggcatagttattcacctccataataataaagaggtttcggcgcatccatcgtacccaggctttctactacttgcaaaagacgactagactcagatgccttcagcccttgaaactctgccagctttgaacccagccatgtagaagcgaaccctgtggaaccgacaccatattcaaaaatttccgcatcctctaacccttgatctgcttctaatgcagcgaaggcgtcctcaggaaacccaatttcgtcaactaacccgttctccacagcttgttgaccatcataaatccgtccgtcagcaatttttctaacagcttcttctgacatgcctcgtccttcagctacaatggaaacaaagcgtccgtatgcattatccacgtaagtttgcagaactttcttgtcctcatcggtagcggctcttgtagaggaacccatatctttcaaggcaccacttttataggtgctatcttcgatccctaatttatccaataaacctgaataattcaatccagacataataactccgatagaacctgtcacggtttcatctgtggcaaagattttgtccgcacccgctgagacataataaccaccgctagctgcggtgttcttcatactaacatagacaggaattccaatttctttgatctttttcatttcacgagcaatctctgcactttcgtaaactccgcccccaggcgaattcacttcaaatagaatccctttgatcgttgggtcctcttgcgcggcacgtaattcttccagaaataattgatgatcatatccttctgttgagaacaatccaccacctgaagtattcgcaatcgtcccttccaaagtcaagcgaaggatgcggttattgctatctccagccgctatttgatgttcctccaattcattgcttccgtataaaagagcattcaatccgtccagtgacgactcttcatttgctggcggagccatcaaagcaaaaacacctgagcacgcaaacaatccaattgcaatcgcaacagccacccatcttctcttattcatttttccactcctttttaatagcggttctcaatcacaattaccgcttcaactagtccacttgcatcgaatttttcgcttttttctttcaatgcgtagccgccgaaatattctttagttaattcatcttgcactcgaaacgcttgtgcttcttgaacagagattgcacccggaagaatttcctgcaggctgtcccaaccagtgtctaacatgatttttgtatcatcattgacattttcttgtttctctaatctttccactatttcctttaactcggaaaacgtcatacattgtacagtttctgacatcttcatccctcactttcttctgtcattgtatcgaaattaaaaaaaaaaggatagtcaaaaaggacaattccaattttacgaattggatcatccgcaattctccttctttaaatctccattacagaacaaacattgcctctgataacatctataccaattattttttttagctttttctattgactaacgcccttataaatattatgataatgcatgtatttctacaaaataatttaaggaggatagatagaccaataggaatagcgccagatctgtacaacagatgacgaggaaagagtttatcgaagttttcggcgggtaactctagggactgcactctataagcaagaacaaaacctcatcgtgagatgaaaacaaacctcttgctgcgcaggtagaaatacataatgaatcgtaaataagtagtggaaagtaggatttgtcattatgtgtggaatcgtaggaattgtaggaaaatcaaatgctgaacaagtcattttgaatggtttggaacgtttagaatatcgtgggtatgactcagcaggtttatatgttgctgatcgtacttctggccacttagtcaaagcacaagggcgtatcaaaaacttggaagacaaagtcacaccagaagtaacaggaacgatcggtatcggacacacccgctgggcaactcatggtaaaccatcagaaaaaaatgcccaccctcatacttcttctaaccaagaattagtactggttcataacggagtaatcgagaattttgaagaattgcatcaaaactatttaaatgatcatcacttcgaaggacagacagatacagagattgtcgtccacttgatcgaagtattgaaaaaaaacctttcgactaaagaagcgttcaaaaaggcactctcattgattcgtggttcttatgcctttgcattagttgataaaaatgaccctgaaaccatctatgtagcaaaaaataaaagtccgttattgattgggcttggggatgggtttaacgttatttgtagtgatgcattggctatgctggatcagactactcatttcgttgaaattgaagacggtgaaatggtaactgtgacggcagaaacgattgaaatcgaagacctaaaaggaaatcttgtttatcgcgagtcttatgaagcacaacttgatttaacagacatcgaaaaaggaacgtatccttactatatgctgaaagaaatcgacgagcagccagctgtgatgcgtcgtctcattcaagagtatcaaggcacaggagaagtgacgatcgatgacgcattaaaggatcaaatgattgcgagcgaccgcatctacatcgttgcttgcggaaccagtaatcacgctggttgggccgcaaaagcgattctagaatctctgacacagattcctgttgaagtacatttatcaagtgaattcggctacaacatgcctttgctgtctgcaaaacctttctttatttttctatcacaaagtggagaaacagccgacagccgacaagtcttggtaaaaatcaatcaaatgaatttgcctagtctgactattacaaatgtagcaggctcgactctttctcgtgaagctgaccatacattgttacttcatgccggacctgaaatcgccgtagcttctaccaaggcctatactgctcaaatcgcagttttaaccttattagcaaaagcaatcggtgatgctaaaggtattggtgctgcacaggacttcgatgttttccatgaattaagtattgttgcctctgctatggaaacattagttgatgaaaaagcagtcatcagtcaattagcagaagattatttgtctgttagtcgcaatgcgttttatattggtcgaagcaatgactattatgtttccatggaagctgcactgaagctaaaagagatttcttatattcaagcagaaggatttgcagctggcgaattgaaacatggaaccatcgcactgatcgaagaaggaaccccagtcatcggaatcatcactgaagaagtgaccggctcccatacgagaggaaatttgaaagaagttgagtctcgtggcgctcatactttagtcatcgtcagccaagaactagcgaaagcgacggatcacattgttttgccttcggtccatccattggttactagtttagttgccgtgattcctacgcaactgttggcttactttgcaacattgcaacgagggtatgacgtggataaacctcgaaatttagctaaatcagtgactgtcgaataaaacttttaaaagtttttaggcagaaaaaagagctgcgacaagacgattgtcgcagctctttttttcgtacaaccaattaaaagcaatttttttagacaagctgaaactgcttggaattgcctattttgatcatcctttcttttctcgtccctcaatttttttaaagtcttttaagtaatgcacaaaacagcaagcagcattcatcccagattcattgcacctctgttgatcaacataggagaaatgtatcatttttttacacaccacgtgccatttatgatgattatccctactatcgtcagtaaactagttgcaacgaataaaatattccccattaatgaccagtgatcactaaaaagtaatgaaagcaggatgaaagcacccagaaccaacataccgatgccattcgctacatacaaacgatctaaatcatactgtgcctttttttcttcagaagccatattgtatccagcaatcaattgccatccatgtctgcttaaaaataggatacctgtaataaaaaacaaacccacgactaaccatcctgttgtatttcccatcacacattcatcctctctacacgtctgcctaacgtttagatccattcaccaatcggtttcttgcgctttatacagtgagtataccacatgaaaatcattatttggattatcattatattttcacaagataaaaaaaccaacgaaaacgactttcgttggtttctgatctcatttattccgcaccgatttcttcccgtacgacagctgcgattttatcgacataataatctactttttctgttgttggtgcctcagccatcacgcgcaatagtggctctgttccagaagggcgtactaagattctaccttccccattcatttctgcttctgtttcttcgacgatttttcggattgccggtacatccatcgcgccatttttatctgtcacacgaatattaactaatttttgcggatagatcgtaacttcacctgccagctcagaaagttttttcccagtctgcttcatgatattcaataactggataccagacagcattccatcccctgtcgtattgaagtctaagaagatcatgtgtccggactgttccccgccaaagttgtagtcatttttgcgcatttcttctacaacgtagcgatcacccacttgagtaatcacatctttcaaaccaatggcttcaacagctttatgaaaacctaaattgctcatcacagttgtaacgatggtatcttgtttcaaacgtttttgttcagctaagtattttgcacaaatgtacatgatcttatcgccgtcaacaatattaccttgttcatcaatagcgatcacccgatcaccgtctccatcaaaggctagtccaacatcggcccctttttcgacaacgaactctgctaatttctcaggatgagtggaaccaacaccatcattgatgttcaaaccattcggcgaagttcccatggtataaaaatcagtttctaagtctgcaaacaaccgattgacacttgtagcagtcgccccattggctgcatctacacagacggtgatgccctctagatcacccgggatcgtttgacggagaaattgggaatacttcaaaagaccttctggaaattcatcaacggttcctaaaccttcagctgacggccgtggtaacgtatcttctgcagcatctaataaagcttcgatctccgcttcttgttcgtccaccaatttgaagccatcattaccgaagaatttaattccgttgtcttgtgctggattatgtgatgctgagatcattactccagcactagctttttggacccgtgtcagataagccacacccggcgttgagatgacgcctagttgaaacacttcgattcccacagatagcaaaccagcgatcagtgcattttctaataactgaccagagattcgtgtgtctcgcccaactaagacgcgaggtcgacgatcgtctgtttcatgttgactcaatacatatccgccatagcggccaagtttaaatgctaattctggtgtaagttccttatttgcttctccacgaacaccatctgtaccaaaatattttcccataatgtattaccctctcttattctttactctcatctgaagttgtaacagttgtttcgctttctgaatcacggttttcttcactagtagatgattcactagtttcatctgatcgagattcggcagatgactcgttgccagtttgaccattcgtttccgttgattggaaaacaggtgtcacttggatcgtcactactttaggatcaatcgtcacaccatctggcactggcacttcaacagttcgctcaacagttgaggtgattcttgaaatatcgattggtacgccaatttgatctaatgtatctaaaatagactggctaccagaaatcgttccgctgattgcactcattctatagataaaatgggagatgccgttaggaactgttccttgctgggtgacgaataattccacttgttttgtcggggcttctaatgttaccgttacgttaactgtttcgggatctggcaaaattgctaatgcatttttagcggtatcccacgcttgtatcgttcctttgactgttgaagaggacgttccgatctcattaggatcaatgacagccaccacacgatcgatatcatttaaggtgcgatcacccgtagtgatcgctactttctgaggatctgcctctagagaagcgatagaatacccttcctttatatctgcgcccgatatgactggttcaacagtaaatgtttttgttactttcttttcaatagtcactgtgatggtcttcggctcgatttcagctgttacacccgaactcaaattctgaacttctaaaggaacttcatgcgttccttcccctaattcagagagatccgccatcacgcgaaagtttcgtgtctcatcatttttttctgcattcaactggatacgatttcgacttttcaaggtgacattcacggtggtttcatacccttggataaaatagctatctgtatcatacgtcgtttggatgggaacattgctaagatgttcttcataaccactagtagagccggatagattgacttgcagtgtggaaccactagcaataaaaaacaacaccaaactaaagaacagcgctagtataccataaaaaatatttcgttggcgttctttcttaatcattttcttccccctttgttcacaccgtcaaggaaagattgcagtagattacgttttgctgttttttcttcaggcacaagctctcgattcaaaatatccaagtattgttctcgagataacccagataacaattggttgttcatagtgatactgacatccccagtttcttcagacacaacgatcgtcaaagcatcactgacttctgacacccccactgccgcccgatgcctagtcccgaattctttaggaatcaacaagctttctgaaaggggcagatacgcactcgaaaccgcaattttgccgtctcgtataatgactgctccgtcgtgcaaaggtgtgttgggaataaaaatattgatcaatagttctccggtaatatcggcatccaaggcaatcccagtttcgacatactcttccaaaccggtagttcgctcaattgtaatcaaggcacctattttgcgtttcgccatatactggatcgctttatctaaagattggaccatcacttcgtcttcgtgcttttcagacttagaggtcttgaatagcgaactccgacctaaatgttccaaacctcgccgaatctccggttgaaaaatgacaatagcagcgatcaccccataggtgattacttgatccatcagccatgagagagttctcaaaccaatcaaacccgctaaaaaacgtaagacgataaacagcccgacccctttgaatagctggatcgccttggtccctctgactaactgaatcaatttgtagaccacataccagacaactaaaacatccaaaacattgattaaaaacgaaatagaaaatatattaaacaagaaaacttctctccaataatcaaaattaaaaaaatcactgaaattcatcgacataaacagccttcctttattcttaagacttcaaataatagtataacataggacttcttttaacacgttgaaaaaaagcaaatttatctcattttttcaaaaaaaatctcacttttttctggactctcgattattggataacacggttgatctttacgtaatggagcttaaaaaaaacagctctgccagatactggctagagctgtgacacttgcctattctgatttttttctccgctccgctctggcagctcttcttgccgcgcgaactgcttcgacttcaggatcagagactgatctacgctgtttagttctaacagattctccttgtttttccaccgattgaggttctgcttcagacaatggctctttttctaattttgctcgaatcttttcttcttgcccagcaagacgcgcataattatagaaacggtttttggcatccaagactgtttttgtgaataatgcacttgcagcacttgggttagctgcacctaaggctgaaaaacgaacctgtgttttcataaacgttggcatcaacgaaaaatcaggttttttatagtctagtgtcattgctggcttacctttttcagtcattaatgggttgtaacggtatagagaccaataaccggaagccactgcttcttttgcttctttgatggattgtctcatgccacctgctaatccatgggtgatacatggtgtataagcaatgatcagagatggtccagggaatttctccgcttcttcgaaagctttgatcgtctgcatttgattggctccggaagcaatttgcgccacgtatacatgaccatatgtcatagccatcatccctaaatcttttttcgacacatatttcccactagctgcaaacttagcaatcgctgaagttggggttgctttagagacttgcccgccagtatttgaatagacttcattatctaaaactagaatatttacatccgcgcctgaggccaagacatgatcgattccgccaaatccgatatcgtaagcccaaccatcgccaccaatcatccattgacttggctttacaaacaagtcgctgtcgtcaagaatcgcttgcaaacttggctgttgatgaatttcttgttgtaaagcagcctgtaattttgccgccctctgttggcttcctgcactttcttcccgatgatcgatccagtcttgcataatcccttgtagatctatcggaacagtgattaaggctgccttcatttttgctgctaaggcttctcttcgtgtttgatttgctagaaacatcccataaccaaattcggcattgtcttcaaatagtgaattggaccatgccggtccttgcccttggtcgttggtcgtataaggagacaccggagcagcgccgccccaaatcgatgagcagccggtggcatttgcgatcatcatgcggtctccgaacatttgagtcaacagtttgacatacggagtttcgccacatcctgcacaggctcctgaaaattctagaagcggtttattgaattgggtgcccattacggtacccggttttgccggattctctttctgacgtagtgtcatagcaaaggcccaattcattgcttgctctttttggctttcataagagctcatgaccaaagctttgtcctttgcgggacacgcttcaacacaaagcccgcagccagtacaatcttcaattgaaacttggattcgatacttctgaccatcttttcctcgcatttcttgaacaataaacccttctggtgcctctgtcagttcatcttcatccactaagaaaggtcgaatcgctgcatgcggacaaacaaatgcacattcattgcacatcgtacaacggtcggataaccattctggcacttctaaagcaatccctcgtttttccactgcagtggtccctagaggcatcgctccttccgtcatttgattccgaacgagcgtccccactgataattgattgccttcctgtcgattgattggctcaacgatctcccgaacataacgggatgttgcagttgatttccgttcaggcacatcaatgaaggcccattcagctggcacttgaatctcgtaaagcaattcaagggtccgatcaatcgctaaatagtttttttcgacaatttccatggacttatgtccgtaattctttaatacctccgcttttaaaatcggcagaacctcgtcgaaaggcataatatcagacaaatagaaaaaggcagtttccattgccgtgttgatgcgtctgccgagcccggtctccattgctaattgcatggcattgatggtataaaaacggatgtcattttctgcaatgtaacgcttgatgtgtttaggaagactagttgcaatttgttgctcattccaggtggtatttagtaggaaggtaccgcctttttttagccccttcagcaaatcatatgtatgcagatacgcaggggtatggcatgcgacaaagtcagcatgctcgatcaaataagtcgagcggatcggtgtgtctccgaaacgcaaatgggagactgttaatcctcctgattttttggaatcataataaaaataaccttgaacatacttatcagtgtgatcgccaataattttgatcgctgatttattggcacccacggttccatcggagccaaatccccaaaatttcgcctgaaatgtattgggattggtcaagtccaaagtagcttccgtgttcaacgagagatgggtaacatcatccatgatcccaatcgtaaaccgtcttttttgctcactttttggtttcgtcagttcttcgtatacagcaacgatttgatctggcgttatatcttttgaacccaatccatagcgaccaccaatgacagctggccggatcgctgcatcataaagggcactttggacatctaaaagcagagactcaccgtttgctcccggctccttgctacggtctaaaacggcaattgctttgaccgttgatggaagtttttccaaaaagacttccaatggaaatggtcgatacaaatgaattgtcaagaccccgacttttcttccttgtttgagcaaatgatccaccgtctgttgtacagtctgagccgaagaacccattgttacaattacttcttctgcatcagcacagccataataatcgaccaaatcatagttggttccgcgcaaatcattaatggctttcatgtatttgcgaattgttgccggtaacgcatcgtaatgggcattgaccgtttctcgctgttgaaaatgaatatcggggttttgattcgttccgctaaccgttggatggtttggattcattgccttttcgcgaaaagctgctaatttttcttgatcaatcaattgagccaattcactgtattcaagtacatcaatcttctggatttcatggctggttcgaaaaccatcaaagaaattcagaaagggaatcccactttcaatcgccgctaaatgagccacaggtgcaagatccataacttcttgaacactgctttccgccaacatcgcaaagcctgtttggcgagccgccatcacgtctgtatggtcaccaaaaatattcaatgcattcgtagtgactgctcggctggcaacgtgaaatacgccaggcaaacgttctcccgcgattttgtacatatttggaatcatcaacagcaatccttgcgaagctgtataagtcgtcgttaaagccccagtctttaatgaaccatgtactacaccagctgctccggcttctgactgcatttcaaccactttcactggttgtccaaaaatatttttctttccgctggcggaccattgatctaccaattccgccattgttgaactaggggtaataggatagattgcggctaattctgtaaaagcataagaaatgtaggctgccgctgtatttccgtccattgtttttttcttgcgcatctctctaacttcctttatcttccattttgagcattctcacacaatccattatagctgaaaaatctacttgaataaatactgcaaatcaaaatagcagcgatttagtgaaagagcaaacgatacagtttctatctaatctaagattttttcacaaatttcatttggttgtttctccttttctttctagttgaaattctgttaaacttaaaaaaaaggaggatgaaacatggatatttcaattatcaaagctaaagaaacaaatacgactactggaatcaagattggtgatgaaaatgctaagccaatcattgaattcatgaatcttcgttgtccttattgccgcaaatggtttgaagagtcattgccgatcctaaccgaagctgttgctgcgggaaaagttcaacgagtgatcaaattattcgataaagaaaaagagtctcttcaacggggaaatgtgatgcatcggtttgtagcaacggataatcctgctcaaacgatcgcagatattactaaaatctatcaaacacaagatcaatggggacatttaactttagaggaggttgcagaatttgcgcaaaaccagctaggattaaccgaacataaccattccacgtatgctggtgaaatcgtggaagaagcccgaaaagcaaatattcaatttgtgccgaccgttatcgtaggcagtcacattttcgatgaatcaatctcagcggatgagttgacacaattgatcaatgaataaaacctgtgccacagttctaacagcaacccactcttgaaggataatcgactcgcacgtgcggtccaacgaagccaaaactacttgatacttagccgttttagcttcattctatcccttcaactgttgtcttgttatgacctgtggcacaggttagtttaactgactttatctcgcaaacgatccgcaaattcattgattttacggattcgatggttgatgcctgatttggagatcgctccagaaggaatcatctctcccaactccttcaagctgacttcaggatgttccaatcgcaattctgcaatttcctgcagcttctctggaagagctcccagccccacccgttgttgaataaattcaatattgtcaatctgtttggaagctgcatcgatggtcttgttcatatttgctgtttcacaattcaccaaacgattgactgaattgcgcatgtcgcggacaatccgaacatcttcaaacttgagcatcgaattggtcgcgccgatcaatgtgagaaaatcggcaattttttctgcgccctttaaataagaaataaagccatttcgtcgttcaagggctcgcgcattcaatccataatagttcaacatatcgcagatatcttgattgtgctcttcatagatcgaatagatttccaaatgatagcggctggtctctggattgttgactgaacctgatgccataaatgccccccgtaaataggaacgcattttttgggcattccccataatttcatccgatacatgactatgaaacatcaatccatccataatatctaaatctagcaatacacgtttggtctcttgttttaagcgaacgatgtaaacattgttctttttcaacttcatttttctacgaaccaacagctcacttcggacattgtagtgatctttcaataaggaataaatccgccgagcaatggcagcattttctgtttgcacattgagaacgaactgctggttgttaatacttaacgatccattcattcgtatcaaagcagctaattctgcttttgcatgttcccgatgtacttctagtgatgtcagttcctttttgacttctgctgcaaaggacatagcgtcgcctcctttctagattttggcaccgtagacgatccgcagtaattcatcgatcactttatcaccgtcatgaaagacaccgccatcacgtaactctaagaaatccgctgaaaccacgcgacaactttcattccgcagtccttggaagtcatgtttcacttggacaaggtattcatcgtagatttctggatccatatagccttctgggaccttctctgtattgactaacacggtatcaataaaagacttccctaaatgttgatgcaaaactcgaacatgatctgcatcagtaaagtgttctgtttcccctttttgcgtcatgatattgcagatgtaaacagtctccgctgccgtttctagcaacgcctgtccgatctcactgatcatcaaattcggcaagatactcgtaaacaagctacccggtcctaatacgatcatatcagcttctaatatcgacgtcacaactttacgtgcagctttgggttcattttcgtcatcttgattccgcacaaacacgtgatcgatggttttacgatccaaggcaattttggattctcccactgcttctgtcccgtctttaaaaacagcgtgcaaaatcaaaggttggtcagaagagggatagacatggccatcaatgtgcatgatttttgaaagtatctggatcgcttcataggtactgttgcgcatttccgcaatggcggcaatgatcaaattacctaaggcatggtttgcaagaaatttgtcttctttcttgaaccgatactgaaaaatatcattatagagttgcggcatatctgacaaagcagccagcacattgcgcaaatcacctggaggcgaaatagacgaaactaggttgcggatctcaccactgctgccaccatcatctgcgaccgtcacaattgctgtgatatcaacaccttgattccgcaaactttttaaaatgaccggcaggccagttccgcccccaatgacaacgatcttaggtttacggattcgataggttttcattttcatgatcgattcaccgtctctttgcgcttatctttgtcacgatgggtcacattgactttgtaattttttgctaaagcagcgctgatccgttcagataaagcgaccgaacgatgttgtccgcccgtacaaccaattgcgaccgtcaaactggtttttccttctttgatatacccaggcattatagtttcaagcaatgtctcaaattgctgataaaactcttcagtttctggaaaagacatgacatagtcatatacggtttcatcttttcccgttagcggacgcaattcgggtatataatgtgggtttggtaagaatcgcacgtccatcacgatatccgcatcgataggcaatccgtatttgaagccaaaggaaacaacttccacccgaaatccatgttcatgggaagaacgaaattcttgattgatcttttctcgcagctgtcttggtgttaaagttgtcgtgtcgatcacgatattcgcttttgtcttcaagtcttccaagatcgcacgctctttacggatcccttccgttattaagccgtccatcgcaaggggatgggctctgcgtgtctctttataacgagaaaccaactcattgtctgtagcatctaagaacaatatttttgtatcgatgaatcgagtattctcgatatcgatcagcatgctttggatttcttcaaaaaaggaacgcgaacgcaaatcaacgaccaatgcaattttggtcactttccctgactctttgatcaattcccagaatttaggaattaaactcggcggcatgttgtcaatacaaaaatagcccatgtcctcaaaactttgaatagcaacggtttttcctgctccactcataccagtgatgatcactagttctaaattatctacttctgtcatcgtaaaactccttcctcactcattaacagtatatcatgccgggcgtatcatttaaacactaccgcacaaaaaaagcatcaacatgagagttgactcccatgtcaatgcctcgctcaatttcgataagttaacgctttttcaattgttcgatcgactaaaatcgattgcgcatcgactaccggataaggattattttccgtgaattcttccatcaatgaaagttcggtacagcctaggacagctttctcacaaccaattttatgtgttacttcttctaagatctcaaaataaagatcttggtctaatgtatcagattctttgatccgatcataaatcaatgtatttactttttgttgtaattgcggctcaggcaagtagacatcaaagccacaagcacgtaactcggcttcataaatcccagccttgatactaccttctgttcctaaaaaggccactttcccggtaacaccttctttttgcaaagatttagcagcttcccgcggcatgtgaagtagcggaatcggtgtggcttcttgcaactgatcaaagaaataatgcgcagtattacatgtcagtacaataaaatttggctgtaataagttctgtttagcgatgtcatcaagcaaataaggaacaggatcttctaaatcgttgttcaagatatacgcagtgcgatctggcactgtcgcatgattgaataacacatagttcaaataatcttggtctttatgagcaacggttcgacggttcaagattcgtacaaaactttcagtcgccatcgttcccattccacctaagatactaaagaagttttccatagactagccttctttcgaatggaaatgcagtttaaatcgtttgttgtaaagatagaacattctttttagtagaatccaacgtttgatggagagatctttgtcataaaaaacggtagtcccccagcgattttcggctagcagctttttagcccgttctttttcttcattttcattggcataatccaaaaagatgtttttcggtacacccaaccaaagcttcgctgttggagcatatgctttcccataaacagtttcttggaaaggcacatcaaatactaagtcttctgtcagaaatttagcaagattcaatccacttaatgtgatgaaaaagctacttctcccctgacgaagattgatttcaaataatttgtattgcccatctcggctatcatatttcaaatcaaaattggcaaagccaacatattgaatttgttttaagaacgtcgaaatcatttgatagatttgttggttttcatccggcagaataaccacgtaattgccgactgctccaggagttggatcttctaaaagtggatgacccaatgccatcactcgtacattatggtctttgtcaacataggcattcagcacacgcatattgctgtcatcccctggaataaaatcttgcacgatcatctcgtaattatagccagcttgataaatccgctcaacaatcttatcgaactcggcacgatcttcgataataaaggctttcttccgtccttcgaaatcaacagataaccaggcgacactatttgccggtttcaatgccacgggaaactcaaatggcagttcttgagtaaagcggccatcctctaatagatctggtgtcaaaataaaagtttttggataaggtaagccaaactcttcacacacttcatagaaactcactttattgattaatcgtttcaacaaagaataatcattcgcaataaatgtgtaatatgacgctaaatctgctttatgtttcgctaacaattcagcataaccatccccgcaaggaatcaacaaataagccatagagggatcgttataagtggtttttgccaaatcaatcaatgtatctaaaaaaccaggatcatgatcaaatcctgctacttgattgaccttgacgattttgctatagcgggtgggggcaagctgtgtcccagcataagcaattgactggatgccatatgcttcgtgaaaggctcttgccataccatagacattcatatcgcttcctaacaaaataggaacgaatttttccggattcataaaaccactctctcttttgcatatataaatttagatttttacctatttactttgttacaacagacctataataccataaagaaaaaagcaatcaaagtatgtacctctgattgccttcctcttctttgaacggatagaacttataggtcgtttattctgttacgaatagacatttacctattgctattttaacaaataaacggtgcattacaagagttatttgagaatttgcagaattattacagtaaatattaaattttgctaaaatcccctttatctccgcctttatcctacctctctcataagactttcttgaggtattttccggtatagctttcaggaactgctgctatctcttcaggtgtaccagttgcaaggatcgttcctccgccctcgccgccttctggacctaaatcaatcacatgatctgctgatttgatcacatcaagattatgctcgatcactagaactgtattccctgcatcaacaaaacgctccaagactttcaataaacgagcaatatcatccgtatgcaaaccagttgtaggttcatctaatatatagaagctttttccgtgagaatttttgtggagttcactggcaagtttcattcgctgtgcttccccacctgataaagtggttgccggttgccccatcgtgacataccctaaacctacatcaacgatcgtttgtaattttcgatggatcttaggaatatgtttgaagaattcgacagcatcttcgaccgtcatctcaaggatctctgctatattcttccctttgtaatgcacttcgagggtttctgaattgtatcgtttgccgtggcaaacctcacaaggaacatagacatccggcaagaaatgcatctcgatcttgatgatcccatctcctttacatgcctcacagcgaccgccgcggacattaaagctgaagcgaccttttttataaccgcggactttggcttcattggtttttgcaaacaaatcacgaatgtcgtcaaaaacacttgtataagttgccggattacttcgaggggttcgcccgatgggactttggtcaatgtcgattagcttttcgattgcttcatatccggttagtttcttatattttcccggtttgttcgaattgcggttgattttttgtgctaaagcttttttcaaaatttcattcactaatgttgattttcccgaaccagataccccagtcacagcaataaactttccaagagggaaatcaacgctgacatttttcaagttgttctcagctgcgccagtcaagcgaatggactgtccatttcctgctcgacgttctgccggcgttggaatctcccgttttcctgaaagatattgtccagtcagtgaatgttcattagccgcaacttcctctggggtccctgctgcaacgatctcgccgccagcatgtccagctcccggacccacatcaattaaataatcagcagaacgcatggtgtcttcatcatgttcgaccacaatcaatgtattgccaagatctctcattttacgcaatgaatccaataagcggtcattgtctctctgatgaagaccgatcgaaggttcatccaagatataaagcacaccagaaagattggaaccaatttgtgtcgctaagcgaatacgttgagcttcgcccccggacaaagtgccagaagcccgacttaaagtcaaataatccaatcccacattgcgcaaaaagcttaaccggtcatccacttctttgacgatcggttttgcgatcatcttttctggttcagagagcgttaatttttcgacaaatgataaggcgttgttaattgccatctcactaagttcaccaatatgcttgccattcactttgacggataatgcttgtgggtttagccggtagccatgacaggttttacaggtcaattctgtcatgtacagacgcatttgttcccgggtgaaatcactattggtttcatgatagcgacgtttgatattaggaagaattccttcaaagggtacttcaacgtcccgtacaccgccaaaatcattttcataatgaaaatggaacatttcgccattggaaccattcaaaataattgcttggtgttcttctggcaattcttcaaaaggcgtgtccatgtcaatattgaattccaagcaagcttgttccagcatttgtggataatattgtgaactaatgggattccaaggaacgattgcaccttcacgcaacgttttgctagtatcaggaatcactagatcagtatcaacttctaattttacccctaatccatcacaatccggacaagccccaaaaggtgcattgaaagaaaacaaacgtggttctaactcgcctactgtgaagccgcaataaggacaagaatagtgttcactaaacaacatctcttcttgaccaatcacatctactacagcgtagccatctgccaaacgtaatgcggcttcaaaagaatcaaacaatcgcgaacgaatgccctctttgacaacgatccggtcaatcacgatggcgatgtcgtgttttttatttttttccagttcaggcgcttcagaaacatcatagatttcaccgtctactcgaatcctcacatacccttctcgttgaatcatttcaaaaacttttttgtgctggcctttcttttgataaacgatcggtgccaacaactggatctttgtccgatctggcaatgccagtacttcgtcgaccatttgttccactgattgactagtgatctcaatatgatcattcgggcagatcgggtgtccaatacgggcgtacagcaaacgcagatagtcattgatctcggtcaccgtaccgaccgttgagcgaggattcttactcgtcgttttctgatcaatggagatcgctggactcagtccatcgatactatccacatctggcttatccatttgtcctagaaattgtcgtgcatatgcagacaagctttccacataccgccgctgtccttctgcataaagggtatcaaacgccaaagagctctttcctgaaccagacaaaccggtcacaacaaccagtttatctctaggaatcgtcacatcaatgttctttaaattgtgtgcgcgagcgccatggattacgattttatcatttgccattctcttgtctccttttactcagctgctttcaattccaagatcgtgtctcgtaaagtagctgcagtttcaaagtctaatgcttttgcggcatctttcatttctttttccagttttaataagagagttgctttctcttcacgagtcatgtcttcatacgaagtggttgtataatcgcctgactcttccgcaactttcgtaatagcgatcaaatcgcgaatttccttaatgatcgtttttggttcgatgccatgctctttattatacgcctcttggatactgcggcggcgacttgtttcatcaatcgctcgctgcatagagtcagtcattttatccgcatacatgatcactttaccatcagaattccgagcagctcgaccaattgtttggaccaaagaacgctcactacgcaagaatccttctttatccgcatctaagatcgctacgagagaaacttcaggaacgtcgatcccttctcgaagcagattgatcccgactaatacatcaaattcaccaagccgcaaatcgcgaatgatctctgtccgctcaagtgtcttgacgtcactgtgaagatatttgactttgattcctaactctttaaaataatcggtcagatcctctgccatttttttcgtcaatgtggtaacaaagacccgttgatctttttctacccgctcattgatttctcctacaagatcatcaatttgccccatgatcgggcgaacctctactactggatccaataaccctgttggacgaatgatctgttggataacggtatccgtttgttcatgctcgtaaggtcccggcgttgctgagacataaacgatctgattcacatgttcttcaaattcttctaaacgtaacggccggttatctaacgcagacggtaaacgaaagccataatccaccagcatttgtttgcgggcacggtcgccgttgtacatcccacgaatctggggcatcgttacgtgagactcgtcaatcacgatcaggaaatcatcaggaaagaagtccagcaacgtgtaaggtggttcgccttctttgcgcccatccatgtgtcgtgaatagttttcgatcccggatgtgtagcccatttcccgcaacatttcgatatcataattggtgcgttgctctaaacgttgtgcttccaataatttgttctcacttcgaagaacagctaatcgatcttcgagttctttttgtatcgaagcgatagcatgttccatatggtcttcgttggtcacaaagtgagtagctgggaaaatagaaacgtgttctgtttcccctaaaatctccccagtcaacgcatccacttctcgaattcgatcgatctcatcgccaaaaaactcgatgcgtaatgcccgttcgtcccgcgatgccggaaaaatttctaccacatctcctcgaacacgaaagcgtccccgttggaaatcgatatcattgcgttcaaattgtatgtcgatcatttctttcagtagttgatcccgcggtttttccattcctactcgtaaagaaaccacttgcttagcatattcgattggtgaacccaaaccaaaaatacaagagactgaagcaaccacgatcacatcgttgcgttccagtaatgaactggtcgccgagtgccgcagcttgtcgatctcatcattgatacttgaatctttctcaatgtaagtatcactggaaggtacatatgcttctggttgataatagtcataatagctgacaaaatattctactgcattattaggaaagaattccttgaactcaccgtataattgacccgccaatgttttgttgtgtgcgataatcagtgttggcttattgacctctttgatcaagtttgaaacagtataggttttccctgttccagttgcccccaacaaaatctgcgccttcttgcccccaacgacgccatcgaccaattgatggatggcttctggctgatctcctgccggctgatattttgagagtaattcaaattcatgggaagtcgttctttcgatcatcttcattccccctgtatttatatttgcgaagcgtccgtgaaacaaaaagaaagctgacgcttttccatagaatagtataccatagcgaacatactttcgccatcttttgtactttttattctgctagtttaactttacttaagatgtcagtttttctaacacccaatgtcagaaatagcgctgttttttgcaaatattgaccgaaagacttgtgtgtttttacaaaaatacctataatctaaaaatacgttaaaatcaaaagggggaattttcttgaaaagaaaatatatgttttgtgcactgttttcagtgattttctgctttttcgcttttgcgaacaagccagtcagtgcagcagaaacaacgtataaaatcggaacagacctgacatttgctcctttcgaatttcaaaacgaaaaaaatgagtatgtagggatcgacattgatctgttaaatgctattgctgaagatcaaggctttgctgttgatttgcgcccattaggctttgattcctcgttacagggcgtccaatccaatcaacttgatgggatgatcgctgggatgagtattacagacgaacggaaagaaacctttgatttttcagatccttacttcgacagtgggattcagatggctgtcgcaaaagacaaccaagatatcaaaacttacgctgatttgaaagataaaacagttggcgctaaagttggtaccgagagtgctcgttttctagaaaccaatcaaaaaaaatatggctactctatcaaaaactatgatgatgctagcgggctttatggtgccgttcgcaatggaacagttgtggccatctttgatggctatccagtcttaggttatgcgattagtaatggtgaagctatgaaacttgtgggtgagcctgaaaaaggggcatcttacgggttcgcagtcaaaaaaggccaaaattctgaattactggctaaattcaacgctggtctaaaagagttgaaatccagtggtaaatacgacgaaatcattgctacttatattgcttcatcagaaagcacttctgatgaagcaagtgaaatggttaaagttgaaccgaaaaaagacgtctatcgaatctcaagtgactctgcattcgcacctttcgagtttcaaaatgaagacaatgaatatgtcggaatcgatgttgatctcttaactagagcggcggaaatgcaaggattcaacattgagtttaatttcattggtttctcaggagcgctacaagcgttagatgggaatcaagcggatggtatgattgctgggatgagtatcaatgatgaacgcaaaaaagcgtatgacttctcagactcctactttgaaagtggtattcaaattgcggtcaaagaaggaaacgatagtatcaagtcttatgaagatttagaaggaaaaacagttggtgctaaagttggtaccgagagtgcagacttcttgattgaaaatgaagacaaatacggctataccattaagtattatgacgcagctgatcaactttatgctgcagtcagtggcggtcagatcgacgccatgatggatgattacccagtcattggctacgccatcagtcaaggacaaaaactaagtacgccgattgagaaagaagtgggcggacaatatgggtttgccgtcaaaaaaggccaaaatcctgaattgatccaaatgttcaatgaagcgttaaaagaaatgaaacgaactggcgaatacgatgaaatcgtcggccgttatatcaaagacggttcggctacagaaaagaaagccgatgaatcaacagtcgctggtttaatcaaaaacaattacaaagttttgctaaaaggtttatggaataccctgctgcttgcattgatctcctttgctttagcgttgatcattgggatcatcttgggactcttcagcgtgtccccaatccgagctttgcgtatcttcgccggtatctatgtcgatattattcgcgggataccaatgatggtgttagctttcttcattttctttggcctttcggatgcaattgggattacaatccccgactttgctgcaggagtcatcactttgacactgaacgctagtgcgtatatcgcagagatcgttcgcggagggatcaaagctgttcctgtaggccaaatggaagcttcccgcagtttgggattgacctatacccgaaccatgcaaaaaatcattttgccgcaagccatcaagatcatgatcccatctttcgtcaatcaattcgttatctcgctgaaagatacgacaatcatttcggttattggtgttgtggagctgctgcaaactggtaagatcattgtcgcaagaaccacacaaagtacctatgtttatctaatcgttgctgtcatgtatctaattgttatcacagccttaacaaaacttgctaaagttttagaaaagaaggtgaaataaatgaaggaaaaaatcttagtcgaaaatcttgtaaaaaaatatggggataacactgttttaaatgatatcaatgtctcgatccaagaaggcgaagtcgtttgtgttatcggtccttctggctcaggaaaatctactttcctgcgttgcttgaaccgtttagaagaacctactagtggtgatatcattatcgatggtgctcatctaatggataaaaacaccaatatcaatgccgtccgtcaacacataggcatggtttttcaacatttcaatctgtttcctcatctctctgtactagagaatattatcttagcaccgatggatttaaaaaagatgtctcgtaatgaagctgaatcaaaagccattcaattgctggacacagtgggtttggctgacaaaaaagacatgtatccagacaatctatctggtggtcaaaaacaacgggtagccatcgcccgtgcattagctatgaatcctgatgttatgctgtttgatgaacctacatctgcgttggaccctgaaatggtcggtgatgttttgaatgttatgaaaaaattggcaaaacaaggcatgacgatggttatcgttacccatgagatgggttttgctaaagaagtagccaatcgcgtcatgtttatcgatggcggaaatttcctagaagacggcacaccagaacaaattttcactagtccgaaaaacgaacggaccaaagactttttagacaaagtcttgaatatctaaacaaaatccgcagaaaacttggtcgttttctgcggattttgttattcatctgacattttagtttctcgttgctgctttttgtactgtgcttctaaagcgattcgtttctgcttttcaccaaaataaacttttgtatcgattggattggctttgttgaatcccccagcaccagtatccatcatttgcccccagcctttcagcggatcttttccttgtttccttaattcagcgttctttttacgcaattcttgtttcttcgcttctttcttttgctgccgctgctcctttatttccttaaaaaaactcatcccataccctcctttgatcaataaagaattgttccaatgactattaataacaaaacaacaactggatacatcaattctctgatccagtgtttttctttccaagcaagatacagcaaaccgccaatgatcagcaataaaatagtcggttcaaacaataagccaatcaaattacttgaataggttctggttgttagttgatcactccctgtgcttaacctaaaagaactgaaacgaaaaagaatgaaacgactgaaaacataacaagacaaaaacaccaatgaatacccttttgcaaaccaacggaatagtttgctaaatggaatttttttcaacaatactcattctccttccgtgattacatcttggaccatgatatctgagagctgctgcagctggactctcatgacaagcgaccgattctccgctaaccatcgagctaattcagtgcaagaggccgatacatgaacggcacttactttcacaccattatctttgacataatttagaatgtcgccgaaatcatagaaattgatttgattggtaagatcattggtaaaatggagattgtcaggactatcccagcctagatccccaaaagtcggataatatttttccaaaaaaaccagtccttgcgtgacgctttctgttacttgccgatcataatcatttcctgttgtctgacgaaccatttcatctgaataaccaaaaatattgtctgaatgataatcaatactataatgttgaacagacaaatcagccagtttttcccttagctcactaggaatttgaggattttttaaagtaatagaaatttcagcctgcttgtactcgccgagtgaacgtaaataggcgagaaaggagtcataggtcgaaaccgcattgcctggctcatatagtgttgcagagggagcaaatgcggtcagcgtatcgctggaaacaattgtctgaactgcctgatcaaaaatatagcgattttcgactgtgtacgcgaccgtcttctgatttcctaaacgagaaatgaccggataaacgtcctctttccccaaaaatgcaagcagagattgccgattgataggatcgtaatggaggtttcgctgtcccatctcataccaatagtagcggtacttctctaacgtatcattcttaagcgcatcttccgaatatagagcattcatcgccgaaggaatcgattgataatcctcgcggtcatttccggttgcacgataataggctaatggtaaaaagtagcataaaacaagcactaccatcccccaaaacaacacgctatagatcatttggagtaccatgcttttctttgtacgatccactgacttttgtaatcgctggtactgttttttatccatgtgaccacctgcttttcacttgttttctcgcttgaaaaacacgagatttcactgtacttaacgttagatttaatatttctgctatttcttgatagctatagccgcgaatcgccaatatcaaaggatgccttaatttgttaggcaattgattcacatgacggagcgcttcttctttttcaagactatcttggtcttcgataggaatctcctgcatcaaagtatcgacttcttccgctaccaaaagataccgcttacgacggtaaaaatcatatagtgtaaacttagcaatcgtaaagagccacctctcaaagtcatctggctttgtctttggcaaagccaaaaaaactttaacaaatacatcttgcgttaaatcctctgcttgatactcatcccccactcttttttgaaagtagtgctgaattttctcgtaatagatctgataaatctcctccaacactacccctccttacttatatagacgagtgaacaacaaaaaagttgcaaaaaaatattatagtaagaatagtatatcactgttactaacgtattcagaaggttctttctacgtaacaaaacaaaaaaagctgtaaaccacgctgaaatgtttcgtgtggcttacagctttttagaatggatttaagcaaagacggttgaccagttctcccgttcggctaaaaactcccttgccaattgttgggcgccttctaaggtatggttggctgcccagccgcattggacttcgttactagctggaacttctgtcgctttcaacacatcttccatcgttttttctaacacagttaaaatttcatcataatcttcatgatttaaaaccgttagataaaatcctgtttgacagcccatcggagaccagtcaacaatgtaatcggcatgattacgaatcaattctgcggtcaagtgctctaatgagtggaggctagccatctccatatgtgcttgattcggttgtttcaatcgaacatcatatttgataatcgtatcttttgttccttgttttttgtcagcgacccgtacataaggtgccttgactttcgtatgatctagattaaagctttccacgttcattttcattctttttctcctctcgcttcgacgagccaaacaaaagcattgatttgtttaaagcgactggtaaaaccattggctcgaaaataggtttcaatatctggtatcaatgggtagtattctcgttgcagatccgctgctaatcgtaagtgattggctttgattgcctgtcttaggatgctttctttatgctcaggggataaaaacatcgtatcccctataatgacttttccgccttcagaaagcagcgctttatatcttttaatcactcgctgtttctctgtttcattcaagtgatgaaagacataactagaaacgatcgtatcgattggaaaattgatctgtggaaattgttccatatctccatcaataaaagttacctgtgacaactccggctttgcctcagctacttgacgcatcgcagccgatggctcgatcgcgaacactgttttctttcttcgaatcaactccaacgtcaaatttcccgtaccactaccaaattctatcacagaatctcctgctttttcagcaatatttgctaacaattctggataatgaagaaaaacctcccgatattcttcatccttccctttgacggtctcgtcatattgcttggcccactcagaaaaaatcggaatgaattcacgccccatcttccagcaccctttctaatccttgctttaagtccgtccataaatcggcagcgtcttcaatgccaatagacaaacggatcaagccatctttgattcccgctttttctctgattgaaggtggaattgaagcatgcgtcatgaccgcaggaacttcaactaaactttcaacgccacctaagctttcagctagtgtaaaaatagttagcgattcaacaaacgcagctactcggttttcggcttttaattcaaatgaaatcatcccgctaaaaccagacatttgttttttggcgatctcatgtcctttatggcttgataaccccggataataaactctagctacagctgcatgttcttgaagcaatgtggcgatttttagtgcattggcttgatgggcttccatcctcaaagccaatgttttgatgctccgctgaactagccagctgtcatgaggccctaacacaccacctatagcattttgcagaaaaccaatttgctcagctagttccgcttgattggttacgactaacccagcaacgacatcactatggccccccagatatttcgttgcactatgaatgacaatatcggcacctaatgccagtggacgctgaaaataaggtgtcgcaaatgtgttatcaacgatggtcaagagatcctttttcttagcaatcgtggcaacttgttgaatatctgtgattttcaacaaaggattagtaggcgtctccagaaagattcctcttgtttctggccgaatcgctgcggcaatccgctgaatcgcttggggatcatcagtcttgaccaatgtatacgtcaatccattctttttgaagattttctgaagcagtcgaaaggtgcctccatagacatcatctcccaacaaaatatggtctccggactgaaataaagaaaaaatagtatgggttgctgctaaacctgaagcaaaagcaaacccacgtatgccttcttccagttcagcaatcagttcttctaatgcaaaccgtgtaggattgcccgaacgagagtactcatattgttttggctgtcccacagctacttgcttgtaggtagacgtttgatagataggtacactgacagcccccgtttcttgatcttgactgatcccagcatgaatcaattttgtgcgaaattccatgtttatgcctcctctagttgaccataaatattttttgacaagtagcgatctccactgtcaggaaagatagtgacgatcgtgcttccctttggcagtcgcttgctttctcggatagcggctgcaaatgctgcaccgctggaactgcctaccaatagaccatgacgggctgccagcaaccgggtataataaaatccctctggatcactgatagtctcaatgctgtctggcataagactcttaaaaaagatcggcctctcttcaacgcctatcccctcgatcgcatgttcatgagcaggcccgccattcaagatcgatccctctggttccacagcaatcaaacgtatagtagaatctatcgactttaaatacgcacctgtcccggcgaaagtcccgccactccccactcctgctacaaaactgtcaattctctcaggaatttcttgaacgatttccggacctagtgttcgataataggcagccggattttgttcattttcaaactgtagcggcaaaaaagagtttggcaattgatcagcaagaaatttggctttcctgattgccccttgcatgccttcttgactaggcgagtgaatgattcgtgctcctaaggctttgattagttgttgcttttcttgactgaatgtatctggaatcacaaaaagcatgtctaatccatatgccaaaccggctaaagctaagccaatcccagtattgccagcggtgggttcaatcacggttgtgtctttcgttattcttccagcagcaactgcttctgagatcaaataactgcctaatcggtctttgatactacctccagggtttaagtattctaatttcgcatagatccggctttggctttctccgccgtagtcagtggctaaaaactgaaaaatcggtgtcttaccaattaattctttaatatctgatacgatcatgggcaaccttcttttcaatgaaatttttgttgtcagtccgctaaagtgctgcagcaaatcagaggcactgcgttttacaattggtcattcctaggtgatcacctgcttaaaaaggcatgatctgtctttgtttacagatctttgcaaggtaaatcaaagcaaacaaaaagaggcactgactattcaatcagtacctcttagagaatgactctaggactctttcccaacgaaagagactcttagagtgatttatccagatgagggaacgattaataggcatgacaaatcagtatgctgctttttagcaccatacaacaacaacataccaatgcaaagttgttgtttgtcatgtctacgtcccctcctttttaagcttgtaaacaaaatagcatgggaaaaaatagaagtcaatctttttttctttgtgaaaaatttttggtgacatatgcatcgacagcctgaaatgcatttgctacctcttctgctgtgatcttaaagggcattcgatggatcgtttcattagggagagtggcttgaataccgattgctagtaattcctgatcgttaagtgagtccatctgcatttctgctaacgttgttggtaaccccagagcttgatataaaacaatataacgttccaactcgtttgtatcttgttccaacagcaattgcatcaacgtcgtataggcaattttttctccgtgagaaagttggtggaacttcccagtagcggctgtcaacccattatggatcgcatgagctgctgctagtcctccactttcaaatcctagtccgctcaaaagtgtattcgcctccactacttgatcgaaagcggctgttacctgttgctgctgattggccttataggcagcgaccccattggcaaacagcactgcttcacatttctcagcaattgccatagctgctaaagtcggccgtcctcctacaagattctgagcgccgcttttagctactgctctggcttcaacatacgtcgccaatccatcggcgatgccgaaagttaataattttgcaggggccttggctaacagagttgtatcaaccaagaccagttctggattcttcggataataactatactgttcaaatttcccttctttcgaataaagaaccgagatggaggaggtaggggcatctgttgaggcaactgttggtacgacagcaaccgctcgcttcaaatgatgggccactgctttaccggtatcgatcacctttccgccaccaagagcaacaactgctgccgcttctgctctttctgcttcttttgcaatacgtctgatttctgcattggaggattcaccgctgaaatttgctaaggttacttcgattcctagatgggctaaatcgcttgccagttcttcgccagcaatcctccaaacaaatggatcggttattagtaataatttatctcctaatgagctaatatagtgcaagccttttttaatacgttttctccttgaatgtagcgctgcagactaacaaatattttttccatgaactctcctactttcatttttttataccaattcccgacattgttaaaattttcacaaacgctagtaaaagcgcagcctgaaaaagtggttttcttcaggctccgctttttattttttcttaccaccaaaggcatctttcattttatcaaaaaatccttcaggttgttgctcattggttacatggccgcttgcttttgcataagcccgtaacgcttctttttgttcttcattcaaattctttggtgtgatcaacttaactttgacttgttggtcaccattgccattgccacgtaattttggtgcacctttgcctcttagacggaaattcgtgcccgtctgggtaccagcaggaatcttcaatttgacatttccgtgaacagtcggaacattgacctcgtcacctaaagctgcttgaacaaagttcaatggtaattcgtaataaatttcggatccatcacgatcgaagatatcactttcctcaacacggaaaacgacatacaggtctccataaggtccgccattgctgccagcttctccttgaccggataggcgcatttgttgaccatcttccacgccagcgggtacattgactttgacgctatgttttttcttttcgtgtcctgtgccatgacaagtcatacaaggttctttgatttctttccctgtaccgtgacatacatcacaggtttgacggctcatgacacgaccaagaggtgtttgacgttccacattgatcgtacctgagccatgacatttatgacaggtttcaggttgtgttcctggttttgcgccattaccgccacaagtatgacaggtttcttcgcggttatactgaatatttttttccacaccaaaaatcgcttcttcgaaagaaagatccacagcatattgcaaatcagctccttgtcgcggagcatttggatttgccgttctgccaccgccgccaaagaatgattcaaagatgtcttcaaatccaccaaagccgccaccggagaatcccccgccgttaaagccgccaaagccgccgccataaccaccaccgtagttcggatcagttcccgcgtgaccatattgatcgtaagcagctcgtttttgaggatcgctcagtatttcatatgcttcagaaatttctttgaattttgcttctgcatcaggttctttattgatgtctggatgatactttttggaaagcttccgatatgctttttttatttcgtcatccgaagcccctttttgtagacctaagacctcataataatctcttttgtctgccattggcttccctccactattttcttgcgtccctcgtattttagcatataatttgcttcagaaaaatacgtttcagaaattcataagaaaaagccaaagtggtgactttggctttttcacaaacagcgattatttatcgtcgccgtctacttcttcaaaatcggcgtctaccacatcgtctgcgccgccttgtgcagcttctggattttcttgtgcttgttgttgtgcagcttgctcatacaacttcactgtcaagttttgtacgatttcattcaatgcatcgcgttttgttttcatttcttcgatattgtttgcatcgacagcagctttcaactcatcacgagcttcttccgctttcttcacttcatcggcatctaccttgccttcaagctctttcaatgttttgtcaacagtgaatagtaatgcgtcgacatcattacgcaaatcaacttcttctttacgttgtttgtctgcttccgcatttgcttccgcatctttaaccatccgttcaatttcttcatcggttagacctgaagaagatttgatcgtgattttttgttctttttgagttcctaaatcttttgcagatacatttacgataccatttttatcaatatcaaatgttacttcgatttgtggaattcctcgaggtgctggtggaatttccgttaattggaatcttcctaatgtcttgttgtcagcagccattggacgttcgccttgtaggacatggatgtctacagcaggttgattgtctgcagctgttgagaagacttgtgacttgcttgttgggatcgtcgtattgcgatcaatcaacttcgtaaagacgccgcccattgtttcgatacccaatgataatggtgtgacatcaagtaaaacgacatctttcacatcaccagtgatcacgccaccttgaatcgcagcacccattgctactacttcatctgggttcactgatttgtttggttctttattggtttctttgcgaactgcttcgacgactgcaggaatccgagttgatccaccgactaagatcacttcatcgatttcagattgtgaaagaccagcatcttttagcgcttgacgtacaggaacttttgtccgttcgactaaatcagcggttaattcatcaaattttgcccgtgtcaatgtcatttctaagtgcaatggaccagcatcgccagctgtaataaatggcaagctgatttgtgtacttgtcacacctgaaaggtcttttttcgctttttcagcagcatctttcagacgttgcaatgccattttgtctttacctaaatcaatgccattttcttttttgaattctgcaaccatgtgatcgataatcttgttatcaaagtcatctccacctagattgttgtccccagcagtagacaacacatcgaatacgccatcccctaattcaaggatcgatacgtcaaatgtacccccaccaaggtcgaagactaggattttttcgtctttgtctgttttgtctaatccataagctaaagctgctgctgttggttcgttgacgattcgttctacttctaatccggcaattttaccagcatcttttgttgcttgacgttgtgcatcattgaagtaagcaggaacagtgataactgctttgtctactttttctcctagataatcttcagcaaatcctttgatatattgtaggaccattgcagagatttcttgaggagtgtatgatttcccttcaacttctactttatagccagcttcacccatatgacgtttgattgatgaaatcgtgttagggttcgtaactgcttgacgtttagcaacttcccctacttggatctcgccgtttttaaatgaaacaacagatggtgttgtacgatttccttctggattggtgatgatttttgcttcgccgccttctaggacagcaacagctgaattagttgtacctaagtcaataccgataattttactcataagtaatacgctccttttcattcatcgttctttttatttattgtgctacgataaccatacttgcacgcaagacacgatcatgcagcttatagcccttttgcaatactgtgacgatcgtatccgcaggcacatcttctgtcgcaggtacggtctgtaccgcttgatgaagattgggatcgaaagtttctccttcagcaggaatttcttcgattccttcttctttcaacgcttgacgcaaactttccaacaccatttcgacaccttttttcaagttagccgcttggtcttcttccacatttgctgccatagcgcgttccaaattatcgatcgctggcaataattttttgcccaaatcttgcgaacggtatttttgcaacaattcacgttcattacggtttcttgctgtaatattagcgatttcggcccgtgcgcgcagaaattggtcttctagttcattgtttttttcttttaaactgtcgatctcgcttttttctacttctgcttctgatagaccagctgcatcgatttcttcttctgacggttctgtcagaggctcttcagttgtctcaagatctttttctacctgttcttctttttctgacacttgctaccatcccttctataattcacttatttgatcattcactgtttgcatctagtgtgcgatagtaatcagccaatgtcattgctaattctcgacgaaaggcatccatcagtccaaacattcgcgaataaggcatactagaaggacctaataaagcaatcgtcccttggccatgaccttcaatgtcatagcttgcttgaatcaaactcatattttggagtaattcattccctagttcctgaccaatgcggatctgaatcgtggagtctctcggtgccaataattgtgtgagttcttctgcatttttcatgaaagagtacatcgacttaaactgacgaacatcttgacttggttcaaaatctaatagattcatccgtccgccgacgtaaattttctcttcaaagagatgactcaacatatcatcgaataaatcaatgattccttctgttgtttgaaaatacttgtgcaaaatcatcggaatctctgttcgcaatcgatgatagaccgtcatgagcggttcacccactaatttttcattgataatccgaaccatcttttctaaatcgctgctatccatcgatgaaggtaatgaaaaaatctgattttcaacattgcctttatccgtaacaatgatagcaataatttgtcgtgcattcaaaggtacgatccgaaagccagtcaatttccgttctttgacatccggtcctaacgataatgcggtatagctcgtaagattggataggatcgtagcagattgctgaatgatttcattgatttcatgaaattctttccccaaggaatggcgaattgctttgatctcattttgattgacttttgatggtcttaataagtgatcaacgtaatagcggtagccggccattgaaggaacacgtccagaagaggaatgtgtcttcaataagagacccgcttcttctaaggccttcatctcattgcggatggtagccgaacttgcttcaaccccatcctccatcaatcgtttggagcccgtaggctgaccagtatccgtataattttggatgatgaggtgtaaaatagtttgttgtcgttgtgtcaacatcttatccactcctccgttagcactctttcacattaagtgctaacacgattattaatataccatatttcctacgaatgtcaagaatttgacacagatttttagcactcttatagagagagtgctaatccacttcattgtcaattagctccaaaaaaagaagatcgaaaacagctcgatcttcttggttattcttaacttaataaaaatttttcaaatacatcattgccgataaacatcccagactttgttaaataaacgcggtctccttctgagactaaccagccatttttagaaagttcttcaacgacattgccatagatcgaatcaaaagaacaggcaaatttatttgaaaaggctgttttcgatacaccttgtttcttccgtaatccaagaaacatttcttcttccatttgattgctggtcgttaacgattctgtttcatggatcggcagttgatcttccctcaatggacgcagatagtgctggatcggtccaaagtttttgtatctcgtctgtccgatataaccactcgctcctgcgccaaatccgtaataatgttcattattccaataaacaagattgtgcttagactcatatcctggccgggaaaaattactgatctcatattgcgataagccagctttagccattgcagtgatggcttcttcaaacatttgtgtctcagattcctgagaaggcaactccattttcccttgcctaacccaattcatgaacatcgttttgttctctaaaatcagtgaatacatagcatagtgaggcaaacccaaatcaatcgctcgtgttagcgtatctcgaaaactttccatcgtttgtccaggtaaagcataaatcagatcgatcgtaatattttgaaaatcatgtttatctaacaaccgaatcgtttgatagacatcctctgccgtgtgcttgcggccgattttctttaacaagcggttatcaaaagtctgcacccccatcgacaaccgatcaatgcccagatttttcaaaactagcaatttatcttccgttaaatccccaggattggcctctaccgtaaattctttggtcgtttgcgtgggcagtaattcatgtatgcctgtaatcagaaggtctagctgcgcagccgaaagggaagtcggcgttccgccgccaatataaatcgtctcacaagtagtgattggttgtttgctcaccgttagagcgatttctttcagcaaacactcgatgtattcatcaaccggttgcccttctaaaaaaactttattaaagtcacagtaataacaaatatgttcacagaatgggatgtgaatataggcagaagtactggtgggaagtgtattgattggaatcttattcatggtttgcatatttttattcctttcagagatcaaatcaacgttcaactgcacaaatacggctcgcagcaaatgaacctgatccgaggtatatccgctccccattctatcataagtaagattatctcgaaacgcctctgcattaaaagtagttagaagcagatctcactgctatccgttaataagaatacaatcgcatgcgcaaaattttaaaatcttcaccgataaatgggaaataggcttcatccccattcaggcgacgatttgtccgccattgcccatcttgtagacccccctcttctaaagaaaggatacctaaaggattagaaccctgctgcgcttgcagatccaatgcgaaattagcaccggtgagatagtaatattctttgtgtttaatgatcagacctgcggaattgatcattttgtctcgagaaaataatttgactgcccagcgatcctgaccattttcatacacaatttggttctgagccccttcttttttaaatgagaagatttgagcttcctgatcttgcaacagtggctcaagggcggcgatgattcgatacccttggtttaaatgaggcagtgtatcggaagaatcaaaggcgtctttcgctaatcctaactgggataaaaagcggtaatcctgactagtatcatccgttagaagatcttcgataccaaaaggtgaatagccgattgctccttgaccaaaagcataaaatagattcgaaatatatcttttgtcaattcgggtttccggaattaacaacggctgatcattcccgtattccgcgatgatcggtttgatttcttcttcgtaaatatctggggcaataaaatccaactgagaggcaataactttccaaacttgccaagtggtggatacagcgccaccactaggatattctcccggccgcctgtctggctttttgagccatacattcgtaaataacggcaacgctaaacgttttcttgcaatctttgcatagtcttggattgctgcggcataatgatatgccataaacacttcatccccaaagggtacttctgaccattgtttagctccgggatagaggtttctgatttcttgcggcaacgccatctgatagactttttctgctgctgacgaatgatcacgactagtgccaagactaccaatctcgttttcaatctgcaccattctgataaaggcccgcaaaggatggcttcccaagtagtcgcagatggcggcaaaggctgaatgagcctgtgctatcacatcttgacatagcggactataactattcatcttgtttccgtcgctatcctctatgcgaaaatatttaggatccgttttgatccattcaggaacatacgtggataagccattcttccaaaggccaaaccacaaaaaaatcacatcgattttcttctcagcggcattttccaaatgggaatcaattaatgaaaaatcaaactgattaggctgtggttcgatcagctcccaataaataggtatcaaaagggtattgatcgcaactttgtcaatcttgtcccatactttttcctccatgtaagcgatagaggaagcagtggagttatggacttctcctcctagtatcaatttttgagaatgctgtcgttgtttcatcattgtcctcctttttcttctcagacagatagtcacgttttgatcgactatccctctcaggtagttgcaagcgtttttagtcgtaattctattataggaatcttctaaaataaggtatactaaaaaaagagaattcatactaaaaaaacagaaatgaggtttttgatgaatcgagcagcactagaatcaattgtgaaaaaactctacgataaatatttgattcctttatttatcttcgatgaaaaacagcaagtggtgattcctcgtaattccttcataactgataaacaagtggcggaacattttttccttaccagccaatcgactgaattggatgtggtgacgttttttgaaggagatgacttttttttcagcagctttacttgtgatctaccagattcttcaattggcaatgtgctgattggaccttgcgggatattaggtactaacaaaagatcatttccttttcaaggatatgattacattgctggggtccattactcgaaagaaagtcgagaatcttttgtcgctttcgttgaattgttttacacgatcctaaaaggagccatccctgatgccaacaagtttcgttggagcgttccagagaaacaagcaaattccaatacgtccaccctattagaagaaaatctttatcaacgacggttagaggatccttatttggactcgtttgaatttgagaaacgttacgtagaggctgtacgccgaaatcaacccgaaaaaattctttggctattccataaaatgagcagcacctacagcgtcgaactagcaaacaacaagctagaaagtttgaaatacaagtattcaggattgattaccattctaactcgggtcagtatcaatgaaggcgttccggtgagtcaagcctatgggttatccgatacactactccaaaaactacaaaatatttatgacgttcaggaatgtttgacccatattcaggaaagtacttatcatttcatgaggttgattcatgcatttcctacccagaaaagttttttgatcagaagtctcatcaattacattgatacgcatatttacgataaaattacattaaacgatttggctgaatttactgaaaaacaccccacccatctgagcacagaattcaaaaaacatgtaggccaaacgatccacacctatatcaatcagcagaaagtagcggaagcaaagcatttgttagtgtttactgattatagctataaagaaatagctgcattgcttcatttttcgaatcaaagccactttatccaagtattcaagcaatttgcgatcatttctcctaaagaatatcgcaaaaactatttctcaagtgtcttttgttcaactgatagttgatggatcaacttataaattctctctaaacaaggttgttaaccgtctttttctgccctccataaaaaaaggagtggatttctccactccttaaaagactcatgttttgggttaactactgctcacagtaattttttgctaacaacgacttatttaactaggtctgaccttcgcatgctatagtgagaaaaaaagctcttcaggctatacgttttcctatcattgaataaacatccgcaagagcgaaatcagataacgaatcaatcgatagatcaaaaacaagaaaaacaggttacctaaaataaagcggaagccatttccaatggaggcacgaaacgagcggaaactaaagtaacgggaccatttgctaaaagtagtttgtccatttcttctaatgcgataggcttcatcataagtattctccaacatatcatagtaaaagataaaaagaggttgtttagggaaaaatgcttttttgaatcctgccatcaacgtgtacgttttattagcagacggaaaattccgattgccgtttttcttgattcgcacttgctgcccgtttttatttttggcagcataataatcttcaaattctacgatttgataaatgatcggttcgctattttcttgttcaaattcagcaattatttgatcgacttcttgccaacgtagataaagccaagcaaacaacacgagcaaaacagcaatcaaaaacaaatttagtagaaatccctcttggatcagcgctagataagcacaaataatcaaaagagcgattccaacaacaatcattcttcgttggaaataactgcgatacatttgttcaaaagatcgccgataataggcaaagtcatcttttacaaaattcatgatcgtcccactttctgaaaagattatttggttcaatttatcaatatcttgtgaaaatgtcaatttatctctcgagtgatcttttttttatttaaatagaatcatttctcttgacttcttataggctactcgggttaaagtaatagataggaaaacgcttttaaaaaaatagaaagttgggaaactatgagtctactgaatgaaacattcacactgaagaatcaaatcaaaatacctaagatcggattgggcacttggcagtcctctccggaagatgcctatcatgcgacaaaatttgctcttgaaaacggctatcgtcatgtggatactgctgctgcctataaaaacgaagcggctgtgggcaaagccctccgagattctggtgttcctcgagaagagatattcgttacgacaaaaattcctgctgaactgaagtcatttcaagaagctgtcgatagcatcaaacgctcaatggcagagcttgacactgagtatatcgatcttgttttgatccatgctccacgaccttggaaaatcatgcgggataatccggagcaaaaaaaatatttcgaagaaaacattgatgtctggaaagcactggaagaagcgtatcaaagtggtttgatcaaatcgattggtgtttccaattttgaccaagatgacctgcaaaatatttttgaccattgcgatgtgaaaccaatggtcaatcaaatcatttatcatattggaaaaacaaatgaagagttgctgcaattctgtaaagacaacgaccttttagtggaaggttattcaccaatcgcgactggtcgcttgctggataatgccgacatcaagaaaattgccgagaactatcaacgctcgatccctcaattatctattcgttatctattgcaaaaggacattttaccattgccaaaatccgttcacgaagaatatattttggataatgcaaaagttgattttaccatttccgatgaagatatggcctttttagatcaactctaaacgtccctaacgcaaaaaatcgctcacctgcaaaatgatcaacttgcaggtgagcctttttacggttgttttatactaattgttcaaaggttccccagactttcacgttttttttatcgaccatcgcttttcctttagcgatcaccgtttcaacatctagcgtatcttgattcaacaggcaaagatcggcatccattccaggagcgatccggcctttttgagccaacttcaaaatctttgctggattagaagtaattgcacgcaatgcaatctccaaaggaatctgttctacttgtacagcttctttgattcctaccaataaagctcgggaactgcctaccccaagcccaatgaattgattgttttcatcaaagtaaggcagacttccttgaccatccgatgtcatggtgaattgatccaacccgataccttcgtctaacaaacgttttagccctttactaaagcgaacttcatcatcttctctttcccaaaaatcaggatcttcacttgcggtaaaatcgatggtaccgcccattttagcaaaagcgatacttgcttcaaacaactcacttgtccgatttgcatgagtcggtaaaaattgactaatagggatctcagtctcctccacagtttgtagcaagagttcgtattgtcgcttgccaccacctaaatgcacattggtgatccctgcttttcctgagagcatgccccctactcgagcatctgctacagcacgagtaaattcttcaaaactaggttgtgaagaacggtgatctgagaccgcaatttcaccaatgccaatcactttgtcgatcgtcaaaaagtccttgatcaatgaatccgtcactggatcaagaggcaatcgatacgaaccgtcatagacataagtcgagattccttccgcttctaaacctttggctttgctgatcaatgccaccatatcacgcccaacaccatcggttcctaaacagccgacaaccgttgtgactccagcagttgtcagctggctaagggttacttcaggcgttcggttctggtagcccccttccccgccaccacctaagatatggaaatggcaatcgatgaatcctggtgtcgcaatcaatgaagaaccatcgatttcttcgacagttagttgatcaaagccgccactgatttgatcttcgatggcaacaattttgtcattgatcactaaaatatctttctttcctaaatattctggtgcataaacttccgcttgacgaataagtttcattctcgcagctcctctcttattgcagaccaatcgctacagcgataaagataaagatcgtacctaacacaaacagaaatccttgcattttaatttggaacttcgcccattttgcccattcgattcgggcaacgccaagcacaccgatcaaactggcagatactggagtgaatgcatccatgaatccggaacctaattgataagctaaaacggcgatctgtctggagacacccacaagatcagctaatggcgccatgatcggcattgtcaatgctgcttgacctgagttcgaagtaacaactaaattaaataagctttggaaaatatacatgaaccaagcaccgataaaggctggcacaccgcttagcaatccgccgatgctgtgtaggatcgtattcaacgctgaaggcacattggcatcagaaccacctagaacaagcaggattccttttgccatcccaacaacaatcgctgttccggccaaatcagctgcacctgattgaaaagcacttgctacatcattcaagcccatgtcttctaacttaaagatcacagcaatcaggcctgcacctaagcccatcacgaagaactgtgaagcaatttctggaatatagtaccctttttgtgttactccccagacgatccaaatcaaaactgccagcatttcaagcaaaatcagtttatgccccaaaagaaacggcttgttttcatcagatgtcttctggatatggtcgcggaaataggcatccgatttgtaagtcaatgatttctccggattcttacgaatacgttctgcatacaccatcaaatatgcagctgataagccagtaatgactacccacatgataattcggaaagttgcccctgaaagaactgggatacccgcgatcccttgcgcaaccgccacactaaacggactcatccaagaagttgcatttccgatttgcgaggccacataggtgaccgttaccgccacgatcgaatcatacccaagtgcgatcacaaatggcaccatgaccatagaaaaaggaattacttcttccgccatcccaaaagttgctcctccaaatgaaaaagcaaagaataaaagcggtaaagccaatcgttctaatcctcgtgtcttactgataaaggcaaaaatcccagcatcaatcgctccggtcttcataatgatcccaaatgcgccaccgactactaagatcaacgcagcgatcccgacagcggaaccatatttatctcctgaaaccaatccttcaaacacaaagttcaagaaaccaaaaccgccaaaatcatctgttccccaaacctttgctgtcttatgaagtttttctgatgtatcatagattttatctccatataactcataaagaacatcatccgttagggagagctcatcgagcttttcttgatcaagtttcgactccccttcgtctagcacactttgcagtgctgcttgatcgacacccaattcttctagctctgctggattttcttctaaattctctaactgctcgaagacaaaatcggtattaagcggatacgcataacggaatgaatcttgtttcaaaaccgttcgcgtgctcacttcaccatttgcatcaacatattcaatctcttccgtactgaattttccggcaggaatcagaaatgtcaatacccatgctaccagcactacgccaaaaatgatcacatacgtgtgtggcgttttcatttttgttaaatcttttttctttttcaccaattttctccctttcaccttatacattgactgcataaattatcatttcccatcttttttagtatagcggaattttgccctttactcattgggaaaccattagaatttgttgtaaattctagcgaaataagctaggagaacactgatgtaccaaacaagtaatagacaagaaaaagtcttcaagacagtaaaatatcttgaagacttttaggtgatgcatcttctatttattcacacgttttgcgatcattggtaaaatcagtccaatcaagataaagatgatcggtgtgatgatattcaatgacaattggaacaaccaagcttttggatcagcagcataatctaattttggtaccatccctaagatacaagcaaatgctgtaaataagaaacaccacaaaccaataccaaagcctagttttgtatttttaacaaacttataatctgatgagaatcgatgggcttgtttattgatcagcatgaaggctacaaatacccataagtaacgtaatggcatcacaaccgaattcaagttcaacaaccagcgatacaattcagtcatatttccgatacctaacgcaggaatgatgatcaagatgctgactaagatccctgtcatgatatatccattgatcggtgtaccttttttgttcaattttgccaaaccatttggtacaaattctggatctgcatcagaaagcaaaattttcaacggcgcatcaatagaaaatgctaatgctgaaatttgcgctaatgcattggcgatcgaataaagaatcacaaatgtattgccaatcccatagaaattgccaagacgttggaatgcttcataagcgccatttaccatcaaatctttaggaatattgtttgcatcgaacagcatccccattgcgattgatcctagtaacgcacataaagcgaccattccggctaaaaagatcattcctttaggaaattctttggcagggtttttcgtgttattaacgtaaggcgaaattttttcacagccacctaccgcaaacaccagcatcgaaatcgtcgttaagtaagtaaaatcgaatttaggaatataagttgaaacagttgtcatatttggtgttgctacttgagctccagtcatcgctggtgctgttactgctaaaataataaataagatcgacatgacaaacatcgctgttccggcaatattaccgatcatcttcaatgtagtcaatcctttagatgcgatccataaaaagaaaagaaaaatagctaaacaaattaatgagacttccattgatccgacagtcgatacgaaagagccgtttcctttaaataaccaactcaatgataccaggatcccttgtggtttttgtgcgagatatgggacgtgaacgacccagtaagtccaagcagcgaaaaaggccaatcgtttggttgaagtttctttgatccaagaggatacaccaccgcttgattccttgaacgttgatcctagttgacctacactcaatgcgtagggaacaaagtataatgccatgatcaagatccaagatacaacaacagtcaatccctgttgtgcatagttgttcactacatttccgagtccccaaacagagacaaacgccattagcgcaatattataccagcgcaattgtttctcgttcattactttctcctttaaacatatgatttcagtgatcgaaccgaattctcgaatgatcatgatttccatgtatcgagcaaagtttatttgtaagtcgaatgagctgtccacaacgctttttcacttctaacgaacttctcgataactgtcattaacattgaccagaaatggaatagaatatcattttttttgaccattcatttcgtttcagtcatcacctcattttagaataaaccccaaaattattttggtcaagagaaaataataacaattttcatcgttttttaacaatgggttaagcgatatataaataacgagataaaaaccattatttagattaaaataactcctattgcgttccgttcctttactggaaattagcacctaaacaaattttttagaaaaaagataaaacagaattttggaatttttcagacttttaactattaatgattagaaaaataattttattcacgcaagatattcccttacaccactcttcccgctaaacaaagtgaacagtaatagaaaaaaaccaacttatattttgtctagactacaataaaaacgataacattcgtcataaaactattttaactattatttaaaataacaaaaaatcttaattagatcagtttgattgacactttccgatcctcttaagattttttacgagtactaaaggtagctcttatttatcgaagtatttcctagtatcaatctcgtcttgttgcagttgttcaatcaaggcttctgcgccactaaaagcaacttgatctctcaaaaagtggtgccagcgaatcgcaacagtctctccatagatatcttgatggaaatctaaaatatagatctccactgttaattgtcggccttgaccaaaggtatcattatgaccaatcgatcccatagacggataccagcgatcacctactttaagctcggtaacatagacaccttcttttggcaggcgcactgtacttttgactttaatattcgctgtcggaaagccaagttcgcgtcccctggcatcgccatgtacgacagttccttcaaactcataaggataacctaacagtcgattggcttctgccatttctccgttctgcaaagcggcgcggattcttgttgagctgactttctcccctgccaaagtttccttgggaacggtaatcacttcaaaacggccttgggcataagaaggtaaaagtgccatgtttgctgtctctttctttccataggtataatcgaatccagccacgaccacttccgcatgtaaacctaccatgtattgatcgacaaagacttgcggcgctaaatttgcaaaagctgaagtgaaatccacttcgtaaagatagtcgactcctaaatcagccatatgggcttctttttgtgataagctggttagatattgcattgcctcaggatccactttttgaaagacaatagatggatgctgattgaatgtcatcaatgccagcttcaatcctttttcttttgctgctgcttttcctgtttcaataactttttgatgacctagatgcacaccgtcaaaaaagcctagaaccaaaacgacaggttctgatggaatgacatctttattatatggatgacgtagctcgataatttccattcttactctcctatttctgtacgaataactttcgcaggttttaatagcccctgtttcctttgatgcggcatatagatactaacgactttatcttgataaaacaatgccacaggtgttgcaggaggttcttgaagaccaaaactatgatatggcaagggcatgccattcttgacattctgccacaacttctcatcaattgcaattttgggaaacccgcttaccccatattcaatgggctgcagcaacttattgattcgccctgattccaatgcttcacgaacttctgcaagcgtaacagattgatctttggtaaagccgccgcttgctaaccgtgtcaagtcagacatatgagaggctactcccaaagcagcacccgtatcgacggctaacgtacggacatacgttcctttcccacagcttacttgaaaccgccacgattgggtgccacttgtctcatcaaagattagatcgctgatccgcttaaatgaatgaatcaaagcttgccgttttggacgctgcacttcttcatttgcccgggcatattcatacaaacgtttcccattgactttaactgcggaatacattggcggaatttgggtaatttcaccagtcaaacttgccattgcacgatcgacttctgctgtagtaaaaggttttgctaaaggcgtcctttcaacaacttcacccgaacggtcttcggtcgttgtggaaaaacctagcgtgatttctcctgtatatatctttccggaatccaccaagtattccacgactttggttcctttgccaatgcagatcggcaatacaccgtctacatcaggatccagggttccactgtgtccgaccttttttgtatgtaaaatttttcgtagtttaaagacacagtcgtgactggtttgaccacggtctttccataatggcaaaattccatccatagtatccctccgcttctttttcaacttgaccattataccatattctaaaaaaacttagtatggtcttaaagtctttcagaatgatattcgttcatgatacacttatattataaggaggtgccacatgattgtattcgtttgttcattgattggtttcatactttttttatatttggttcaacgtggtacgctgcaacaacaagaggaggcactggctttatttgttatcaagagccgaacacctgctttaacacggatgatgctcttttttacaaatttcggtaaagcattgcccacgatcatcttattgttattgctttatgtttttccagctacacaaactatcctagcgccgaaagcagcagcgagtgtcttacttgtctctgcattcgcttatctgattaaacggatcgtccgcagagaacgaccaaacgatcatcggttagtcgaagaaaaagaccacagcttccctagtgcccatgctgctacttctgccgcactttatggaactgcagcgatgaatatggcttttcttttgccacctgctgttctgcccatgagcattcttgcggtcctgctcagttttatgattgggttcagtcgcgtttatttagggatccattttttgacagatgttatcggtgggtggtttttaggattagcagttgctgcattgatcaccattttgttatgatttttggccttgcacagtatctgtttgatcattatagaatagcctcacctctcagtaataaaaaaaaggccgcgtatatgaagcgacccccaaaagttagaccaaaaaatctaacttttgggggtcgttatttgtatggcaaaatatccttttgaattaaaactaaaaatcgttaaagaatatcttagtggcgtgggcggatatcggtatcttgccaacaaatacggtatttcaagcaagtctcaagtaagtaattgggtgaatgtctatcgtgaatacggagaggaaggtctattgagaaagcatcaaaatcagaaatattctgttcaatttaagttaaatacgctagagttatatcaaacaagtgagatgtcctatcgagaagttgctagcactttagaaatgaacaaccctgcgcttattgccaattggatgcgtaatttcagagaagcaggtattgaggggctctcaaaagagaaagggcgaccacttactttgactagaaaaaaagaaaacaaaaaagaaaatacaacaactgaagaacgcgatcgtatcaaggcattagaaaagcaagtccgatcccttcaaattgagaatgcctttttaaaagagttgaggaagctgcgaaaacaggaagcccagcaaagacgcaagaatcaatcgcacgaatcatcgccagcctccgaggatcattcaaactagttgagcttcttgaaacattgaaatttcctaaagcaacctatatgtattggcagaaacggtttgacagaccaaacccagaccaagaaattgaagaaaaaatgcttgaaattcgcaaagatcataaagattacggctgtctgcgactaaaaaaagaattagagaatcaagggattcatgtcaataaaaagaagattcaacgtctgataaaaaaactaggtatcgaagtaaagtcttacactcgaaaatctcgacggtacaattcttatcgtgggaaggttggcactgtcgccaaaaatcgtattcatcgtcggttttatacaaatatctgtcaccaaaaaattacaactgataccacagagtttaagtattatgaagtagacaccacaggtgtcgttcgtcagaaaaagctgtatttagatcctttcatggatttctacaatagtgaaattctatcttatcggatttctgaaaaaccaaacgcactagccataatggaaggattagaagaagcaatccagatgacaaatgattgtccatttcgtagaaccttccattcagatcaaggatgggcctatcaaatgaatgcttataagaataaattgaagcagcataaaatcttccagagtatgtctcgtaaagggaattgtttagataactcacctatggaaaacttctttggtttattaaagcaagagatttttcacggagaagtctatcggagtttagatgaattgaaaacaaaaattgaccaatatatctattattacaaccataaacgcatcaaaaagaaattaaattggcgaagtccggttcagtttcgagaagctgtaaaaacagctgtctaacagttaatcttatcatacaaaaaaggagtggatttctccactccataaaagtctaactttttggggtcactacatatacgcggcctttttttatgtgattctttattcgcctttatgcaaatcgcgaatcatttcatcgatcttatttccatattgaacagattcatctagttcaaattgcaactccggaactttatataatgacagtgcctgtcccaattcacgacggactaaccctgttgctttctctaatccggcttgtgctttttgcttttcagatgcaagatcactcaaagtgctgtagaaaatcgttgcttgctgcaagtcccctgtcacgcgaacatctgtgatggtaacatcttgaacacgaggatcacggactttcttacgaagtatttgattcacttcttttaagatttcttgggcaactctacggtcacgataattagccattcaaaaaacctccctgataactagtgtcttaattcattggtacttcttccattacgtagccttcaatcacatcatctactttgacatcattgaatttctcgatcatggcaccacattcaaagcctagttttacttctttcacgtcatctttgaaacgtttcaaactagctaattttccttcatagatcacgatgccgtcacggattacccgcacaccgctgtcacggcgaatgctgccttccgttacataacaaccggcgatcgtaccaactttagaaactttgtaggtttcacgaacgatcatttgaccagtgattttttcctcaaattcaggatcaagcatccctttcatcgctgtttcgatttcttcgatagctttgtaaatgattcggtgtaaacgaatatcgacttcttcggcttcggcttgttgtttagcttgcggagttggccgcacattgaaaccaataatgatcgcgttacttgctgctgcaagtgtcacgtcactttcattgactgctccaactgctgaatggacaatattgacccgaacgccttctacatcgattttcttcaatgaagcacccaacgcttcagcagaaccttgaacatccgctttaatgattacattgacttcttttaattcgccttcttttaggctttcaaacagattgtcaagcgttacccggctgctggaagcgcgttgttccatcacggcgcgtttcgcgcgttcttcccctgctgcacgagctgtcttttcgtcttcaaatgtaacgaatcgatcacccgcttgcggcacatcattcaatccggtaatttcaactggtgtagctggtcccgctgttttgtcccgacggcctaaatcgttggtcatcacacgaactcgaccgaatgtgttcccgacgacgataggatcacctacatgtaacgttccttgctgtaccaataaggtagcaaccggaccttttcctttatccagacgagcttcgatcactgtaccgatcgcccgttgtgatggatctgctttcaaatcttctacttcagcaacaagtaaaatcatttccagcaattcttcaatattttgaccaaatttagcagagatttctacaaagatggtatcgccaccccaggcttctggaatcaattcatattcacttaattcttgcatgacatgttgcgggttcgcacctggtttatcgattttgttaaccgcaacgatgattggtacttttgctgctttagcatggttgattgcttcgacagtttgtggcattacaccgtcatctgctgctacaactaaaatcgtaatatcagtgatacttgctccccgtgcccgcatacttgtgaaggccgcgtgtccaggagtatccaagaaagtaattggtttgccatcgatatcgatttgataagcaccgatatgctgcgtgatcccaccagcttctccgcttgtcacacgagaatggcgcaatgtgtctaataacgttgttttcccgtggtcaacgtgtcccatgatggtaactaccggcggacgagaaacaagattttctttgttttgttcttctggttcaaagaatttatcgatatccgcgatgtcgatttgaactttttcttgtggttcaataccgtaatcagttgctaacaattcgatcgtatctttatccaatggttggttttgattgaccataactcccatcataaacaacttcttgatgatctcagcaggttcacgatagatttttttcgcgatatccgctacattcatgccttctgtatattccaatacttctggtaattcacggaatttacgtgctggaacaggtggttttttctcttgctgttgacgaccttttttcccttttttgttaaacttgttgcggttattgttattgaaattattgttgcgtccgttgtagtttgacttaccacggttttgatttccaccgcgattttggttatcaccagctggacggctttgtgttccttgactgctagccccttggtttggacgactttgttgtccttgtgctgggcgattttgactttgatttccttggttcggacgattttgttgtccctgtgctgggcgattttgttgcccttgaccgctaggacggttttgttgtccttgtgttctattttggttcgttggacgattctgttgtccttgattgttacgattttcttggttattcactcgattttgacttccttggttatttggtcgattacttccttgatttgttgatccgttgttttgacttgttgggcggttgggttgtccttgaccattaggacgagaattcgtcgtgttccgctgcccttgattattgtgtcggttctggaagttaggattatttctctgcgttttaaatttcttttgctcttgtttttccggctggttggctggtttctgatttgcgggagttggttttgctgatgatcgatcatttggattgccgcctaatgactgccgcaatttttgcgcctctccatctgagatcgcgcccatgtgatttttcacatcaaagcctaaagattgtgctttttcaacaacctctttgctcgatttgttccattcttttgcaagttcataaattcttttttttcccatgcaatcaccttcctaacctaatattaattcctgcaccttctttgcaaatcctgcatctagaatgcccaccaccattcgcggtttgccaatggctgaactgatttcatcggcagaaaatgtatctaggagcggaatttcataataagaacttttgtcctttattttcttttgtgtatttttaccagcgtcactagcgacaagtacgagagctgctcgttgttgacgaatctcttttaacgtcatctcttcgccagtgatcaatttcccagcacgcatggctagtcctaacatattcaatgctttttgtttattcatttgcaaataactctcttcgggctttttgatgcgtcacatagtctaagagttcttgataaaattcatctgacaatttcgtctctaatactctatccaagatccgcttatcccaagctaattgcgcttcctctggttcgatagcgatgtacgctcctcgacccggcatcttgccggatggatcgatcgcaacggttccttctttcgaacgggtgatgcgcagcatttcttttttgggaatcatttcccctgaaacaacagattttcgtaaaggaatttttcgttttttcatcgcgatctctccttgacttatttttcgtcaaaatccatgttttcgtaatcgtctgccgtcatatcagaagcaatgatcatttcgtcgtgagactcattatcctcgattgtgctttcttgactttcaacagcctcgccttcatcgatataggcgccttcttctaattttgcataaaattcttccatgtctgactccgatttgatatcgatcttaaagccagtcaatttcgcagccaaacgggcattttgtcctcgtttaccaatggcaagcgatagctgataatcaggtacgaccaccgtacaagctttcggattatccacatcaaaaataacatcagtcacttctgctggattcaatgcatttgcaataaataccgctggatcatcattccactcaacaatatccatgttctcaccttttaattcattgacaattgcttgaacccgttgtccctttggaccaacacaagttccgacaggatcgacattagcatcaaatgagcgcacagctactttagagcggtctcctgcttctctggcaatgctgacgatttcaactgtaccatcataaacttccggtacttcttgttcaaataaacggcgtaataaatcaggatgactacggcttacaaaaacttgaggccctttcgaagtattttcgacccgagaaacaaatactttgatccgatcgtgaggttgatagaattcatttggcatttgatcttgttttgataatactgcttcgatttttccaaggttcacatagatatagcgattgtcctgacgttcaacgatcccttgcaggatatctttttcataggcactgaattcattgtagatgattgtccgttctgcctcgcgcacccgttgcaaaatgacctgttttgctgtttgagcagctatccgaccaaaatctttcggggtcacttcgaaacggatcttatcgccaatctcgtaagcaggattgatcgtcatggcttctttcaaagacacttccaattgagagtccattacttcttcggtcacttctttgactgcataaacgtgaatattgccttttttctggtcaaattcaacttctacattttgcgcttgaccataatgacgtttgtacgctgacactaacgcggcttccaatgcgtcaatgacgatctcttttgaaatgcctttttctgcttccaatgcatcaagtgcatttaacatttctttactcatgattcttccattcctccgtgtttaaaattggattgctaaacgagctttggcaatatttttccgttcgatcgttagttctttttctcttgttttgattcgaatcttaatgactagttgttcttcatcaaaggactgcaaaaagccttcaaattgcttttcgccttccaccggctgatacaaggaaagatggatatattctccaactgcacggtgatagtcctcttcttttttgagggggcgttcagcaccaggcgaggatacctctaagaaataggcttgtgggatcggatctggatcacaggcatccaatttatcactcagttgttcactgacaaaggcacattcttcaatatcgattccgccctctttgtcaataaacacccttagaaaccagctttttccttccttaacaaattctacctcaactaattcaaaattttgcgcttccagaatgggggtcacaattgttgtgacagtttccaccactgtactcacacgacatcgcctcctttatttctcaacgaaacgaacttcattccattaaaaagagtgagcgaaaaaaccgctcactcactctaagtatcattactatgtaaatataacatagtttactaacaaattcaagtatcctagcattttgtggctttttctgaaaattttacatcctatttcttaagatttcttccttcagaatacttccttgttccctctatctcaaaataggcagctgtctttcttgattcaagcaatgaaggcgacaagcttcgtgatgacttgtggaagcaaagctttcggatcaaagtccatcggcgcttgatcaggaaaaaagtgccacatgcggtagccataaacgcccagaacagcaatcatcagtccaagccaaaagtagcgattttgattgatacgctgaaccatgggctttttccagaaaatgacaagtaacactagcaaaggaatgagccaaaaaagtggatgaaaataaaaagcgccttgtatgtcaccttcaaaaagatgcaaataggcgcgagtcattccacatccagggcaaggaacccccgtcagcagtttaaacggacacattaataatcggtccaatcatcagtgtcttgagtaactgattggcttgcagaatctgcagactcccacacttgattcatatccgattgtaaaatggccatattgataatgtccaaaccaaaaatcgctaagacaacaaacaacactttattatcattgatacgtggaaatttcgttttttcctgtgcagtgataaaaatgtccgcgattcgataccaccaataaatttggtacaacccgcaagtaatgatcgtcaacaacacagacatgcctggggtaaggcgataatcttcactatattctgtcaaatcttgcgtggtttggtatagccagaaaagtgaatagatgccgcaagtaataatagttagtaaaatcaccattaaaatggactttttcttggattgataattttgatacatcggttactccttctaaaagattgaatctttttacttttcttccaattatacaccaatccaaaaaagtggaaagtccttttaaaggaaatttatttcaataataatgaaaaaaaaggatgtaatctaagctttttaataaacgaaacctctgaaggacattgggatgctgttaatctccaactagtcaccagtaataacgccagctggacaaacactttttttccactgtcattcggatagtctcattttttgcttctattacaaaccttttattacaatccttttaattgatttatgcgcgactataattttttacttctgctgccattgcatcaacaaagatatttagttcttcaacgttcgtttctttgctgccgtaacgacgaatattgacagttgcatctttgacttcttggtctccgacaactaactgataaggaattttttgcatttgtgatgcgcgaattttgtagcccattttttcattgcgatcgtccacttccacacgtaaaccttgtgattgaagacgttctttgatctcataagcataatcgctgtgtgcatcgactgaaacaggaatgatcgttgcttggatcggtgccaaccaagttggaaatgcgcctttgtaaacttctgttaagtaggcaacgaaacgttccattgttgaaacgatcccgcgatggatcacgactggacgatgtgtattttcaccatcttcaccaacataagttaagtcgaaacgttctggtaataagaaatctaattggatcgtggaaagcgtttcttccatgcccaaagcagtttttacttgaacgtctaattttggaccatagaacgctgcttccccttctgcttcgaaataatccaaattcaattcatccatcgctgctttcagcatggtttgggcattttcccacatcgcatcatcatcaaagtatttatctttgttttctggatcacgatagcttaaacggaagcggtaatctgttacattgaaatctttatagacttcaaccatcaaatccaaagtccgtttgaattcatctttgatttgatcaggacgaacaaatgtatgtccatcatttagagtcatttcccgaacccgttgcaacccagaaagagcgccagatttttcgtaacggtgcatcatccctaattcagcgattcgaatcggcaattcacgataagagtgaatatcgtttttgtagaccatcatatgatgagggcaattcattggacgaagaacgagcatttccccatctcccatgtccattggcggaaacatatcttcatgataatgatcccagtgtcctgaagtcttataaaggtcaacattggccatgattggtgtataaacgtgttggtaacccaagcttacttctttgtccacgatgtagcgctcaatggtacgacgaatggttgcaccttttggcaaccaaaatggtagaccagcaccaacttctggagagagcatgaataagtctaactctttccctagcttgcggtgatcccgctctttggcttcttctcgtaaacgaatgaattctttcaactcttttttgtcaaagaacgctgttccatagacccgttgcatcatttggttatttgaatttccacgccagtaagctcctgccacagataaaagtttgaacacttgaatccgtcctgttgatggcacgtgaggcccgcgacatagatcaacaaactctccttgttgataggcagtaatcgtttcatcttctggtagttcactgatcaattctactttatatggatcttcagcaaatagttctaaagcttcttttttcgataatacacgacgttcgatcggtagattttctttaacgattttcatcatttctgcttcaattgctggtaaatcttcggcagttacagggctttctccattatctgtatcataatagaatcctgtatcgatagctggtcccacgccaaaatgaatgtttggataaaggcgacgcatcgcctgagccattaagtgagctgctgaatggcgaaccaagcctaaagcatcctcatgatccggtgtgacgatttcgatttgtgcatcctcttcaatccctcgatcaagatcaatcaactgaccattgacctttcctgctaaggcttttttcgctaaacttttagagattccttcagcaatttcttttgttgtgatgccaactgcaaattcttttttcgccccatctgggaatgtaattgttagtgtcatttgttttccccctactgatttatttgatcaatgaatgattcgaaccaaaaaaagtcctagtatcagataacgatactaggacgaagatttcgtggttccacctaatttcaaatacaacaacgctgtatttctttgacgggataacggtacgaccgcctttgtttcaacaaaggtttgaaaaagtggtcatccattggttttcttccaggaaattttcagccgtgatttccctctcttatcgaagactctcaaattcaggtgtctttttcatcaatcaattatggcttcatttaaccactatctgcttaaaaaatcaagtaaattatttccaatcaccattaactgcatactgtccttttttcatttcgttgataatgacatgaatatgttctttaggtgccccagtatttttgtggactgcttcagtaatttctttcatcatattggtcaattgttcttgcgatcggccttctactaattctacatgaataaatggcatagtcatcactcctctgttcattagtatacgcttcttaattatgctctgcaataacctgctctattatcgaatgactgtcccttatcaagaataagcgtttctgacaatctaaagattcttccatttcatttggctggatcttcacgccattttctcgaatgccatttttgaacatacttcatcaccttactggcttcctcttcatggtacaaaaattgatgttgtctgcttacataacgagcaatctcatcaaatagttgaacgattttccataaggattcgccgcaagtttcaacagatgaaaaacaaagtgccgtcaaccgctcatactcttcttctgataaataattttgaagatatttatggttctttccggtactgagacgatagtctgcttgatgcgctagataccagtcatattgccgaagcaactcttgccagcaaatttggtacaaatggtcggcggcatagaaaagctgatttctgacaagccctttgacgacataagtcgctacccaccaaaattcgttacaactgtcatgaaacgatttttctgtcggtggtttaatccaaaagatagaggcatcaggaactgtcattccctgcagaaattcttttggatcatagagacgctcaagaaagggttcagcttgcaacaaatggatcaattcaaccgggcaaagcatcaagtctatgcgattgccatcttcaaaaatgcatcaagaatgtaaaacgtcctcccaaagagggttgcgaaagcacagaactttctggagtctgcatgatcatgatctgtccgaattcttccagccagctaggttctgctattagttcttgcatattgtcaacaatataaacgatatcataatcttgaaaccgatcgcttattgcattaggttctcgccgggacccagagattgcgattgcttggacacctattttttgaccaactcgtaaaatcactgctagcatttcagcttcattccgcacagctatcctccctttctttgatccaattgatctcaaaagcatacttaaattttaccatagaacgatttttcagacgacattcgcaaagattatatgctataattttatgtcgcaatttttttaaggaggattccttgtgaacgaacgtcaaaaagaacaactacatgtcgatgatacgatcgcattgattcgaagagaacaaatggtcttagcgcagcaaaaagcggacttggctacaaaaatggaggatcagttaaaagagatttccgaaaagaagattcgtggtggtgacagcgaagctttttacgaatctgttgttgaatatcagcaacacgagcaagaattgctgttaaaatatcgaacagcggaatctcaagagaaaagggtcaaaacattggaaacaatggctagcaatccttattttgcccgaattgattttcaagaagaacaagaaaaagaaacactttatctagggatcgcctctttaagggatcagcaagaagaaacaattgtcatcgattggcgggcacctatcgcaaatttatattacgaaggagaattaggcgaaacgttttatgaaacagaaaccgatcgctttacagttgagttgttgctgaagcgtcaattcaaaattcaagaaggccagattttgtctatggtggacacttcagaaatcatcaatgatgagtttttgctggagattttagacgaagcctcttcttctcaaatgaaaaatattgtctcaacgatccaaaaagcacaaaatcagatcattcgtgatactactagcaagttcatgctgattgaaggaattgccggcagtggtaaaacatcggcactgttgcaacgggtggcgttcttgctttaccgcaaccgcaaatggctggatgaagaacaagtcttgcttttctctcccaatcatttattttctgattatatttcaatggtcttgccttctcttggggaaagtgaagtgccaacacgtacgttccaccatttcatccaaagagctctgcccaatttccaaatcacaaaagaaacacagctagaagaaactttcttatcaggagcagacgatcggattgaaaagatcaaaagcagtctgaaacttgtcaaattgattcaacgatacgtacagaagatttctgcgatcggtccgttatttcgtgatttaaaaattcaaggacagacatacattacgaaagaacaaatccgtcgttggtatcaagaaacaaatcaagagcttcctttgtatcaacggagtcaattattacaaacaaaattactgaaaaaaatcggtggtcttgaaaaagatgaggccaaaaaagattgggtcaaagaagcaaccgaagagcagttgcagcaacattttgccaaagatccttatcaggagtacaccgaagaaaatgaacaccgattgcgtaagcaaatccggcagcaaatcgttaagaaaaaattccgctcactaactcgtggtgtcaaacaataccagtttatcaaccaaaccaagcagtatttacatttcttacaggcagttcctaagacgttgttagacgatcaagcgatccgtgatgaagattggcaacaacatctccgacttctgcgagaaggtctgcggcaacgccaattgacccaagaagatgccgtgctattctttttgttgatcaaacaactttacccaatctatgtggatgaaaaagcacggtttattttcattgatgagatgcaggattttccgcctgctcaagtggctctcttacgtcaattatatcctaaagccggaattactttatgtggtgatttaaatcaaaaggtctacggtaatgaaacgatcgttggttcgttggaagagttgtttcctgctgacagcgtgactcggtatcaattaaaaaccagctatcgttcaacgaaagaaatcacggattttgccaaccaattcttaactggttccgatcaagttgaattgacagcacgcgaaggggctctccctcaagtcattcaaaccgagaacgaaacagttggtctggactacttgcagcaagcattaaccaaatcacagtcacactggcgcacagctatcatctgtaagacagctaccgactgccgagcgctttatgcccagctctctgaagagatgcaggatcaagttcaattaattacttcagaggaagattttatgaaacgtaaaatcatgatttttccagcctttttagctaaagggttggaatttgatcaagtattcttatggacgtatgggacttcttttgtgacggagcaagatcaattgatcttctataccatggcgacccgtgccatgcaccaattgattgttttgcaaaataacaccaatcaattgctagagaaagctgatcccgcaacctacgcattacaattgctttaaggaaagcgattgatacatcaaaaaaacgagagcaagcggacaatcccttgctctcgtttttgcctagcgataaatgatcaatcaaacaatattcttctcgacaaaagccttgtttgatcggtatttgttttgtcatttttttacagggttcgatcaccccttcaattcaccgataaagagtctcgtttctggatatttcatcgcgacaatcgtcaaaatcatctgaagttctgaaacattttcttcattgtcaggatcaaagattttactatgttttccaatactgccattgtcgatcaatcgatagatccggttccattccataaattgttcgacatctgtaaagtgactgaggggaaaaccggaaccatctagaatttctgttaaacgaaaagcaatataagaactgtcgatcacatattccctttcaggatcaatttgattacttttctgaaaatcaatgattgctttttctggacgatgatgcagcagccactctaacaacaagaaaaagccttccatccgataattgtccaaaaataagcgttgggacgcttccgatactcgaaaaaccagcgggatcaaaaaattccgtttataaatcagtaaaggcgcacgatctaccgtcacattcaagtaacgattcaaataggtggctccacgaaagccgcccaaacggtatccctctacaccgtattttttgtatttgcggcacagtgcagaacaatcagaaactgagacagatacttctgctaatttatcgtatccgcttaaaatccgatcaaaaggctctaaaacgattttttcttccaactctgccgctcccttcttgctcatactgctaattacttaaataataacataaaaaaagcgattaaaccaaaagaaatacccctttgttttttgaaaacgataaaaatgaaagtaaaaaaacacccccgaaagcacagataaactttcaaggatgtcttacttttattcttcttcgctgtctgctacattatgataaacgttttggacatcttctaagtcttctagtgcatcgatcattttttcaaatttttcaagatcttctccagtcaaagtgacttcattttgaggaatcatctgcatctcagcaattgaaaactcagtaattcctttttcttttaaagcttcttgaatcacatgaaaatcactaggttctccatggacgatgatttgaccatcttcttcaagaacatcgcgcacgtcgatgtctttttccatcaagtattctaagatgtcatctgcatccgtaccagaaaaaccaaataatgccgtattatcaaacatgtaagcaaccgcgccagaaacacccatgtttccgccatttttaccaaaagctgctcgtacgtctgctgctgtacggttaacattattcgtcaatgtatcgacgataaccattgaaccatttggtccgaacccttcataacgcaattcggagtattgttcatcccctgaaccttttgctttctcaattgctcggtcaatgatgtgttttggtacattgtatgtttttgcacgttcaataacaaagcgcaatttttggttcgcatgaggatcaggatcacctgattttgctgccgcgtagatttcgattccaaattttgcataaactcggctattgtttgcatccttagcagttttctttgctacgatatttgcccatttacgacccataatttcacttcgctttctttataatcaaaattccttaatcattatacttgtgatttcctgttctgtgaagtaatttcagttcaattctttagaaaaataggggaacgaccaaaattttgttctacaatctgtggtgatgccaactgatagatttgatctacccgtaaagaatacccaaaacgctcgctttcctttttgccaaatttagaaatgagcggcaggtctgtcttctttttaacttgctttaaataagtttgacctgctgttgtaaaccccaaaatacgaatcccggtattcttttgcgcttgttggacttcttcactggttgcttgaaacaatagataacacatcaaccgctgaagtctagttctagtataccgttttgttttcagaagtgccataaattccgcaaaagaagtggcgtgtaaacaatctttgatccgatattctaatccttcggtcacttgataccgggttcgcaattgttcaagaggggttgcgataagttggtactgcaacaatggccaaaaaaactcccaatcaatcgtttggtctaataaatcatttcttacactttcaggaacgtaccctttaatctcttgacctgccttcacagctttgcgaatagccgtcgcactggcaatcatcccaccagacaattcttgtgagtgataggccgcttgtttccttgaaatcggcaacagtttcattggtgatggatactgacacgtttcacgagcatagcgcatgcccaatatgtgattaggcaaatgagcctctgccaaaaagtctggatagactgctgcaaaagccgcatgcattttttgtgtataggtttggttctcagaagcattctcttggaaaaactggtcgatgacttcttgattgtttcgctcaaaatgcgcaaatgcttcataatcaaatggttcgggagcgtccgttccaaaacataaaaaggagcaatccaatgattgcagaattctaattgctccttttgcaaagaaatcagctgattgaactgaccaagccggcggtaattctacaattagatccacgccattttcgagtgcagctcgagcacgctgccatttgtcaacgattgccggttctcctcgctgcaaaaagttgccactcatcaccgccacaacaacatccgctccagatgcttttctagcttgctggacatgaaattcatggccattatgaaaaggattatactctacaacaataccgcatgcttgcatttctccactcctttctcccatcagcaaaaaaatttaagttctttttaatctaaaaaaaaccgcaaacaatcaaagcttgcggcagacaaagaaccaacgacggctcttttcatttggcggactatcaataaagtctgcatacatttcgatttcagagaagccagcattttctaacatccgctgataactttcaagcgaataggtgcgttctcggtgtagttcatccattcgttggaaagttccatcctcattttgcacaaaaaaagtcaaaaaatgttcaatgctgtgaggaacttctccttggtaactttcccagagaaaggcaaactcatctgtttgatagtggtagctgtaatcagggaatacttcatcgatctggtacgttgagtgtacatcgaacataaataccccgtcgtcacgcaagctgttataaaccccatcgaaaacttgttggacactttgttcatcttccatataacagattgagtcagagtaacaagtgatcgcttcgtaggttcccacatctgtcagatccagcatgtccccttctaccaattggatgggcgtatcctcttgttccgcccgctgactggcgatcatcaacatttcttctgaaaggtctaagccggttacatcaaaacccgcttttgcgaattctactgctaatgcacctgttccgcaggctagttccataatttgttttttttcacctaaatgacagcaagaaaaatccagccacttttgatagagactggaatccattacttcgtcatagacaaaagcaaatgtttcgtaggccattattaagccacgacccattcattcagatcaacaagcggtgcatctgaccataatttttctaaattataaaacgcacgttctgaagcgttgaaaacgtgaacgatgacatcaccaagatcaatcaagacccatttaccaccatcttttccttcaacacggcgaacctccacttggttttcttcttctttgtcaagaacttcatcaatgatggcattgatttgtctgtcactgttccctgaacaaatcacaaagtaatcggctaataatgaaatttcacgaacgtctaatgccataatatcttcggcatgttttgaatctgctgctttaacagcaatttctaaaattctctggctatctatggtaattccctcctaatggtttgcgacccaatgattgtatgtttcaatcgtcttgggataaattggtgcttccttttcaatcaaataaagcaatgtatgtttcgtttcgtaagctactgcagcgtcaagatcaatcatagctaattcacgggcttctttcacaccaggaaatgaccgaccaggttcgatataatcggcaacgtaaatgatcttatccaacaaactcatttctgcagcaccagtcgtatggatacgaatggcttgtaggatctcttcgtcatcgatgcctaactctcgctgaacaaaatcggctcccacaataccatgccaaatagcattgctccaattgagcaattccagatcaaaaccatctcgccgaatgacaagctggaattcttcatctggacgctctttggcataatcatgagtcagcgcagcgatactggctttttccggtgaagcaccgaatttttcagccaatgcgacagccgttttttccacacctagtacatgctgaaatcgtttttggctcatatgcatttgtacttcctgcatcaataattcgcgttcagcaggcgtatactgttggctattcatccagatacagccccttttcttgaatatagtttaacacattttccggcaataagtagcgaatcgagcatccttgttgcactttcttacgaattattgtggagctgatatccatcaaaggcacatcgatccaaatgatcggatagggtgtttcaacgggataactaggacgacgaaccccgacgaaggtgaccaactccatcaattcatcaatccgatgccacttcggcaagtattgtaccatgtcgccgccaataataaagtaataacttgtatcagggttcttttcagtcagttccttcattgtatcaaaagtatagcttttccctttacgtttcaattcaatgtcttcaatcgcaaatcggggattatccgcaatcgctaactgtaacattgccagtcggtgagcagccgggatcgtctttttttcatcgacatgcggcggaagatactcaggcataaaatagactttatccaagcccaaagcttgcccaacttcttcacccatgaccaagtgggtatagtgaacggggttgaaattcccccccagtatgcccacttgttttttaggcgcttgataagccgcttctgttgtatataaggtctgaactttgccaaacgaatttccttgcatgtcaaatcactcctataatgaacgtacgtttacagagatttttttatatttttcttttgtagatggtttgaataacacaatcacgcgtccaatgatttgaacaacctcgcattgaatcgcttcactgattgctgtagcagcgtcctccgccacttcgtcggtattttgcaataaagataccttgatcaattctcttttttctagcgcttcttcgatttgattgatcattgcctcattcaacccgcctttgccaatctgaaaaatcggtgttaaatgatgcgcttcactgcgtaaaaaccgcttttgttttcctcgtaattccatgttctgccttcttcctttaaattaatgctttccgtttgatcacatcaacgcctttgggtgcccaaccagcaacaactcctggttttgtgactgtgatccatcctaaacctgcaaaaacaatatctgttttttctttgatcgaaaattcaaagcgaactaactccggaaaatcagctaactcatcaggacgaggcggttgtaaaagaccaccaacatgtttttgataaaaagcatcagctttttctaacttcgtgcgatgcagcaccacatcatttgctacataagcaatgaatgagctgcgctctccttgaataaagtcaaaacgtgccactcctccgaaaaagagtgtttggccagcattcaattggtagcttttcggtttgatttccttattcggcgccacgatttttaaatctttctttccaaggtaatgagccatctgatgtcggtggatgatccctggagtgtcgatcaaaaagtgaccgtcgtcgagaggaatttcgattttatcaagggttgtccctggaaaacgagaagtagtaatcaattcttggactccagccgtctgtttgatgatttgattgatcaatgtcgacttaccaacattcgtaacacctaccacatagacatctcgaccttctcgataatgatcgatcgcctgtaacaattcagtcatttcggcggctttttttgcacttgtcaataaaacatcgattggacgcagccctgcttcatgggcacgctctctcatccattgggtcatttttgatttcttcaatgactttggcaagatatccactttattgcccactagcaacacaggattgtctcccacaaaacgatgaagtcctggaatcaacgaaccgttaaaatcaaagatatccactacatttacgattaatgcatctttttgaccgagttcgttcagtaaacgcagaaaatcatcgtctgtcagcgagacatcttggatttcattgtaatgtcgcaagcggaaacagcgttggcaatagacttctccggtttctaaccctttctctaatgcagagagcggtgtataaccaagctctgttggattttctgtctggatcagcgcgccacagccaatacaatgaatcatttcttcattcattatcaaattccacctcgccatttcatttctggattgtgtttcaataaatacttcataattcttcgctccagcaaacggttgaattgtgttttccatgaatccgtattaatgatcggcttcactaagatactacggacccctgctcgattagcaccttgaatgtcggtcatgatttgatcaccgatcatcacaacatcttctttttgcaagccgagttggcggtatccttgcttgatgccacgagaaaaaggtttcaatgctcgatggacgtattgcaaaccaaagggcgccactgcccgtgcgacccgttcactattattgtttgaaacgacaatcaccgggattcccgcattcttcatttctaacaaccaattttttagctcttcactaccgtcaggatcattccaagcaatcagggtattatcaaggtcagttagaacagctttgatgccttgcttcttaagttgatggggagtgatctgatagatggcatcgaccatccaagtcggtttaaattttgaaaacatagattctccttgattcttttattcatgtgacaaaaatagtcaatttgttgacacgtctagataaaaacagcttgtcagctgacaagtcgtcaatcagtccccacagggtcactgatgattatttaaaagcatcctacttataatgctactttcaacctgtaattatacaatagaatcgtgtgaaatactagactgagctacaactctcagcaacagattttcatctagttgaaaaaagcaacggatcatccactgctactttctttaaaaaataaaaaagccgaacgatcagaggagtgagcaatcaatgcagattacttctgcagcttccttcctcaagaatcgttcagacaattcattgtttttcatcttgaccgatatgaacgcacatcacactaaccaacttcatggtctaaaaaagatcataagacttttgccagaaaatcgattgtccgcggattttgcggtgcatcaaatatttgagcaggagtcccctcttccataatgaccccttggtccatgaaaagaacgcggtcgccaacctctttggcaaatcccatttcatgggtaacgatcaccatcgtcatcccttcttgagccaaacgctgcatgacactcaatacctcaccgaccatttccgggtctaacgccgatgttggttcgtcaaacaacatcacttctggctgcatcgccaatgcgcgagcaatagcgatccgttgcatttgtcctccggataagctttggggataagcttttgctttatccggcaaccctacgtcagtcaacagtttctctccgattttccgagcgtcttctttagacattttttttactttgattggcgacaatgtaatattatccattactgtcagattggggaagaggttaaagttttgaaaaaccatgcctaatttttcccgcatttgataaatatcattttttttgtcagtaatgtccgtccctttaaagtaaatattgccgcttgttggttcttctaacaaattcaagcagcgtaaaaaagtactctttcccgatccggaaggtccaatcacaacaacgacctcaccttttttgatttcagtattgatacctttaagcacctgatttgttccaaatgttttgtgtaaattctttactttgatcattgtatccatcttttttcctcctatcgccggtaacctttgccgagttttttctcccatagattcaacaagcgggaggtggtaaacgttaaaataaagtaaattacagcggcaacatataaaggagttaatggctgatacgaacttgtcacaacaatttgtgcgctattcatcaattcgtagataccgatagtggataacaaagaggagtctttgatcaaaacaatgaactcgttacctagaggaggcaagatattacgcaaagcttgaggtaaaataacataccgcatcgcttgtgcaggacgcaatcctagcgaaccagctgcttctgattgaccaaaatcgactgcattgataccaccacgaacgatttcagcaacgtaagcccctgagttcaatgaaagggcgataatccctgggaatagtcgtccaaagtcaagattcaacacaccaaacgaaatcgtcggcagtgagaacagcccctgcaataacccaaatgcaatcaatatctgaaccagcatcggtgttccccgtaacacttcgatatacgtattagcgatccagcgtaatggttttacttttgataacttcatcaatgcaaaggtgattccgaggatggtgcctaggatcactgtaataatggagatgacaatcgtaatcaatacccctgagataaagtaaggataataagtcgacaagaaggaaaaatccataaatttactactccgatctattcagccgcattttcgttggctaagtctgtattcttttgaacgtattcattaattgtccctttatcattcaattctttcaaaatacggttcaattcatcttttaattctgtgctgccttttggtagagcgatagcataagaatcatctggtgaagcttccaaagcaatgtcagccactgccaaatcatcattttgagcaacatatgagtctgcaacggcactttcaagtactagcccatcgatcgatccttgtttcaattcattgatcaagttaggcactttcgcaatcgaaaccaattgtgagtcagctaattggttttgaaccacagcctcttggatcgatcctttttgggcgcctaccttctttcctgaaaagtcatcgattgcagacaatgcatccgtattgtcctttttgatcacgattttttgttcaggtgtaaagtagttgtcagtaaaatcaaatgtttgttttctttcatcagttgctgagatcccagaaaccgcaatatccgcttttccttggctcaatgcagttagaacagcattgaactctaagtccattacattgactttgacgcctaattctttggcgatttcatttaccagatcaatgtccgcgccgacgatttggtctttgccatcaatcaaagcatggaactcaaaaggtgcaaaatcagctgatgtcgctacatttaatacaccagcagacttgatagcttctagctgattttgatctcctttttttgacgaatcagtgcttgatgatccaccattcccacatgcagctaaagttaataaagcagcaactgttataaatccactcatcaatttcttcatttgttttctccccttataaaataaataattatgcatatattcccatctttattcagaatatatacataataccacaatgttattgaatttcaaacaactatctgctgatgtttattatattagagaaatttcacaaggacaaataaaaaagcttgaaatcaatgacggatcaaaaatcgacattgatatcaaacttatgattaaaatttgcgaaaacgctgatagcgctcagcaaggagttggtctatattcttttgtgctagagcagcgatctttttggtgattgccgatcgcatttccgcgatcactgtctctttcgacaacagttcaccgtcgatggtctcgggaatcactttttcgatcactccaagcttgtgcaactcttgcgctgttattttcatgagtccggcagcttctttcgcacggcttccatctttccagaggatcgatgcaaagccttccggggataaaatcgcatagatagaatgttccatcatccatacttcatcccctaaagccaatgccaaagctccaccactgccgccttcgccaataatgattgccaagattggtacttttaaatctgacatttctaagagattgcgcgcaatcgcttctccttcgccacgctcttcagcgccgacgccgcaataggcacctgctgtattgatcaatgtgataacaggccgttgaaatttctccgcttgtttcattagccgcaacgcttttcggtaaccttctggatgaggagcaccaaaatttcgtcgaaggttctctggcaggttccgccctttttggataccgatcactgtcacaggtttcccatctaaggcagcgaccccgcccacaacagcttcatcatcggcatagagacgatccccatggaattcctgaaaatcgctaaaaacatgttcaaagtaatcaagtgccgtcaaacgatctttgctgcgggctaactcaacgatctcatgtgccgcttcaatcatttgtcatccacccctttgtcgtatgcaatttaagcaattgggaaattcgttcccttaattgtgtccgtggaacgatttgatcgacaaaaccatgttccaacaagaactctgctttttggaagtcttctggcagttcttgtcgaatcgtttgttcgatcactcgtctccccgcaaacccaatcaatgcctgcggttcagcgagaatcacatctccttccattgcaaaacttgctgttacgcctccggtagttggatctgtcaagactgtcaaataaaataaaccggcttcactatgacgcttcactgctgcagagattttagccatctgcatcaatgaaaaaatcccttcttgcatccgtgcaccaccagaagcagtgaataatacaacgggtaagttcttcgcaagcgctcgctcaaacaatcgagtgattttttcacctacgacagttcccatacttcccataataaagttggaatccatgattcctattgccacaggttgctgattgattgtcgcttctccagttaacacggcttcatggagaccagttttttcctgtacggaagctattttttcgagataatcaggaaagttgagaggatcttctattttcacatctgtatcccattcttccaagcttttttcgtcgatcgttaatgcgattctttcccaggcactgatacggaaattatagccgcaatgaggacagactttttctgcgcccatttcttttgtatataaggtccgtttacatctgggacatttcgcccaaagattgtcgggcactgttggttcattggcaggtgcctggccgcgattaggattgatgcgaatgtaattcttctttttaaataaagccattctcttccctcctattgttcaggcgtccagtttggcaagaattcctcttgtaaaaaggctgtgttgtagtctccggcaatcacttttggatgaccgatcagatccatttggaattctgcattcgtcactacaccctcagtcactaattcagccaaagctcgctgcattttcatcaatgcttcaaatcgattttctccatgaacgatgacctttgcaatcatcgaatcatagtaaggaggaatcgtatatccagagtacatggcactatccacacgaacgcccagacctcctccaggtaaaaacaaattgtgaatttttccaggggaaggagcaaaattaaaggctggattttccgcattgatacgacactcgatggcagcaccttgcattttgatatcttcttgtttgatatccagcggttcgccgctagcaatctcaatttgtttttttacgagatcgatattggtcaccatttctgtgatcggatgttcgacctggatgcgagtattcatttccatgaaatagaattcgccagcttcatccatcagaaattcgattgtaccagcattgcgatagccaacagcctgagcggcgcgaactgctgcagctcctagttcttgacgtttactagctgatattacgaccgatggcgattcttccaaaactttttgattgttccgttgtaaagaacaatcccgctcgcccaagtgaatgatattcccaaaagaatctcctaaaacttggacttcgatatgtcttgcgggatacacgattttctcaatatacatttcatcattaccaaaagcggcttttgcttcttgctgagcggaagaaaaatgctgcggcaattcttcttttgtcaatactttacgtatgcctttaccaccaccgcctgctgctgctttaagcatcactggatagccaatttcttcagcgatcgtcaatgcttctttcacatcagaaatcgctccttgactgccggggatcactggcacttgtgcttcgatcatcaaccgtcgggcattgattttgttccccattgcatcgattgtttcactcttaggaccaataaagacaatattgcattcttcacacatagatgcaaaacggctattttctgataagaaaccaaatccgggatggatggcttcagctttggtaacgatcgcggcgcttaatatttgttgcacattcaaataagagtctgctgctttcgccgggccaatacaaatggcttcatcggcaagttctgcatgtaacgcttctttatctgcttctgaataaactgcgaccgtttggatcccaagttcgcggcaagcacgtataatgcgaacagcgatctcaccacggttagctatcaatactttagaaaacatttttcacctatccaatcatgaaggtaagttctgcttctgcaacttttttgccatcaacataggcaatccctttgccgattcctgctgcagattttaccttgagtatttctacttctaagatcaatgtatctcctggtgttacttttttgcggaattttgctttatcaagtccgccgaaataagcggttttacctcgaaaatccggtaaagacaagagtgcaactgcccccgcttgggccattgcttcaacgatcaatacaccaggcatgactggttcatgaggaaaatggccttgaaaaaaaggttcgttgatggtcacgttcttctttgctaccacccgttttccttcttctagttcttcaatgcgatccactaagagcataggatagcgatggggaatgatttctttgatttcttgaattgacataactgacatagcttacccttctttcacacggaataatggttgatcgtattcaacgatctgctcattttcaactaagatttcaactaattcgccatcaacatcgctaacaatttcattcattactttcattgcttcaacgatacaaaggacatccccttttttgacagaatcgccgatttgtttgaattggctttgttcaggactaggttttaagtaaaccacacccactaaaggtgaaacgatctccgttcccgctataattggctctgaactaacctcgagggttccagcagctgttggttgtacgcttggtactggtgcagctgcagggatgctttcaactttgacatctgaactctcggatgaaccttgacggctactgaacgaatttttattaaaataaagttcgatgttttcttttttgagctgcaattcagtcaaagaggactgatcaaattgggaaagcagatccttgatttcatttgtttccaattaagcttcctcccaacgtttcaataagatgactgcattgtgtccaccaaaacctagtgagttactcattgcatacgtaatttctgctggctggctttggtttttcacaatatttaagtcgatttcaggatcttgttcacgaacattgatggtcggtggaataaattgatgctgcaaggctaaaagcgaggcaattgcttcgattcctcctgctgcccccaatagatgtcctgtcatagattttgtactgctgacgtaaggtttgcgatagtcgtcccctaaaccatattggatcgatgtagcttcagctacatcattagctggtgtgcttgttccgtgagcattgatatagcctacttcggctggagtgatcgctgcttcagacatcgcgagtttcattgcttttccagcacctgaaccgtcaggattcggtgcagtcatatggtaggcatcacaattggcaccatagccaacaacttccccgagaatcttcgctccgcgcttttgggcatgttcaaatgattctagaatcaaaaccccagcaccttctcccataacaaacccgctgcggtttttgtcaaatggtgtggatgctttgtctggatcagattccgttgttaatgccgttaaagaagcaaaaccagcgataccaatctcacaaatcgttgattcagatccgccagcaatcatcacgtctgcataaccatgtttgatattgcggaaagcctcaccaatcgaatgagtaccggatgcacaagcagagaccgtagttgtacaaataccttttgcccccacacgcaatgcaatgtttcctgccaccatgttgacgatcgacatgggcacaaacattggagacacacgatttgcacctttttcatgcattcgaatcacttggtcttgaatagttggcaaacctccaatacctgatccgaccatgacaccgaatcgatcggcatctaacgcttcagaattcaaacccgccattttcattgcttcaagggcagcatagatcccataaatcgaaaaaagatccatccgtttcgtatcttttttgacaaagtatttttctagtggaaactctttgacttcagctgctactgaaatccctgttccactggcgtcaaatttggtaatggggccaatcccattggttccattttgcaaactagctaaaaatgtttctggatcattccctattggggaagtcacaccgtatcctgtaataactactcgattcataagtatctcctttctatccttgcatggccattccgccatctacgctgactacttgacctgtgatataagcgctttgggccaaaaaaaccgcagcttttgcgacatcttctacagcaccaaatcgctgcaacggaatattattgatcgattgttcttttaccttatcagaaagaactgcggtcatctccgtttcaataaatcctggtgcgatcgcattacaggtaatgcctctagccgctccttcgcgggcaactgatttggtaaaaccaatcacgccagctttacttgctgcataatttgcttgaccaatgttgccagtcaatcctacgacactagtcaaattaatgatacgtccttcgcgtagtttcatcatctttttgagagctacttgcgtcatgttgaaggttccagtcaaattgatcttcaatacactttcaaattcttctggtttcatgcgcaacaataacttgtcattggtgattcctgcgttgttgactaaaatgtggatcggtcctaattcagcttccgcttgtgcaagcatcgaaacagcttgatcgtattcggatatatcaccgttgactgcgatgcatttcacaccaaaacgggtaatcgtctctataagagtttgaggtatctctttccgcccattcaatacgatattggctccttctttggcaaatgcttctgcaatgccaaagccaatccctcttgaactaccagtaataaagacatttttatttgtcagttccataaattcctcctaatcaaaccttgaaagtgtgtcaaaaagtgtttgagcatcttccactctcgaagcagcaatggttttgtcgatttttttcaaaaaaccggtcaatacttttccgggaccgatctcgatcatctgctcaattcccatttgtttcaactgctcgatgctttcataaaaacgcacaggtgatttgacttgcttctctaataattctttgacttgttcttgtttcatcggtttcgcagtcgtgttgctgatcaccggcacctgtaaatctttgatttcaattttcgccagctcttgagcaagttgtttagaagcgggttctaaaagttttgtatggaaagggccgctgacatttaatggaatcattcgtttggctcccgccgcttgcaataactgaacggcttggtcaaccgcagctacttccccaccgatgacaatttgctgcggcgtattgtaattagctggcgaaacgatccctacttggctagcttctttacaaatcgcctcaatggtttcagccggagtattcatcacagcgaccattttacccacaccctgtggtgcggcatttgccataaacttgccgcgtttttgcacgagggctacagcagtttgaaagtctaatgcgccgcttgctactaatgcggaatattcacctaagctcaaaccagccaaagcatcggcctggagacctttttcttttaacaaacgccaaaaagccacactgacggttaaaatggctggctgcgtatattcagtttgattcaaacggtcattttcagtaaaacatagttcagtcatatcatagccgagcatctcacttgcttccgtaaaggtttgttgaacacttgattcttgctgatataactcctgacccattcctacatattgggctccttgaccgctgaataaaaatgctgttttcattttaaactccttttttgaactgaaagattttggagaaaatggcatcttcactcgcagatctcagcgagtgaaacacactctttctattacaaggaaaggctaggctgtttgcctagcctcgttttttatgcttgttgtttttcaacgtatttaactagatcttcgacagttttgatgccgtcttcagtttcgatttttacatcgaattcatcttcgatctcgttaatgatttggaaaaggtctaagctgtctgcttcaagatcctcttgaatgtttgtgtttaatttgatttcttctttttcttttcctaattcttctgctacgatttcttgaattttttcgaataccatgtgtatattcctccaatgtgttttcttcaatattgattgtgaacaggctataaagctgccagcatggtcccccatgctaatccgccgccgaaacctgagaacaccactttttgtccgctgcctaaagacagcgtgccgcgtttcacttcttcatctaacaaaatcggaattgaagcggctgaagtattgccataaaattgcatattttgcaaaaacttatgtcgcgggacctttaatttccgagccactttatctaagattcgggaattggcctgatgcaacaagtaataatctaccgattcatgctcactgattgcatgaatggattgaacgacatcgcgtgtcgcaaaatcaaaaatttcacgaccaaccatctgcatacaagcactgtattggattgacgaacttccgtaaggattcttattttcaacaaaacctgatgtcagagagagtcctctggttccatcagactgcatcgattccttcaagagatgctgatggttggttgcttctaaaagcaccccgcctgccccgtctccaaataaaactgcggttgaacgatcttcccaatccaagacctttgacagcacttcaccgccaatgacgagcccttttttagaaccggtccgaatcaatttttctgctaaagacaatgcataaacaaatccggcacaagctgcgctgatatcaaaagcaaaagcttgatgggcgccaatattcccttgaacttggcaagcaactgccggtgtattgaaatccggagtgatggtcgctactaggataaagtccaattcatctggagcaagtccccttgatgccaaaagtttcgtagcaacattcgtacataaatcggaagtattttctccattactaattcgacgttctttgattcctgtacgtgaaaaaatccagtcatctgatgtatccataatttctgaaagttgctgattcgtcacgatttgttcaggaacatagcttgctgttgcggtaatctttccaaacatattcatccgttacactcacttataatcttgtaaaaagtcatgcagattttttaaggctttaagtaaagcttgctcttcatccgtagacatctggcttagaacgcctttgaccatctcacggtgaaaatgttgatgtacccgataaagcaatttgcctttttttgtcaacgcaagtttgactacgcgtcgatcgtcttcactgcgaatgcgttctacatattcttttttaaccaaacgattgattgcaatggtgagggtcccaacagtaatagaaagctctttagcgacttctgaagttgttttcttcttgtacatgccgattgcttcaatcgtatgcatttctgtgattgaaagatctttaaattgtgatttctttaattctgattcttcgatcacgagaatgtcattgaagacactgactaaatagtcgttgaccgtttctaaatttggttccatatctttcaccatccgaatagtttgataatcaaatcatttgatagtcaaactataaagtaacttttagagaattgcaagaaaattttttgatttttattttttttaagcgcatttttattttcagtacgcttttctaaccttcacaagtttttaagttgacaattaccagagaatcgagtagttaaaaattattttgattatcaaagatttcttccatcatttcacgaaaatgattatcgtgtcagaacatcacttgttctacaccttaatttttggtatcgttgcagtgtagaaacgaggtgatggacatcaacgcacggatcgaatacttaaagcaaaaagcaaatgcgttaccccaaaaacctgggatttatttaatgaaagattctcatggcggaattctgtatgttggaaaagccaagcaattgaaacaacgagtttcttcttattttcgcaaaaatacacagcatacaaacaagattctgcgtttagttcacaatgtcgtagatttcgaaacaattttcgtagacacagaactcgatgcgctattgttagaatgtcagttgattcagcaacatcgtcccatttataaccgtcaaatgaccaactttcttaattaccaatacatccgctttgatgcaggaaacatcgttcgaacaaatgaggcagcagaggatgcactaggaccttttcgccgatccaagcaattgccggaaatcattgagatattgacagaaacgtatcaattaccttctgtcaatccttataaacttctctcgttgtccaaacagttgccgttaatgcaaactattcctttggaagaaaaactgaatgagctgaaacttttctttcgtgcagaaagcaagacaatatttcgttatctcgaccaacgattgcattattttgcggaacagttactttttgaacaggctggtcaactactgtaccaaaaaaaattgcttcaatccttttatcgagaaattctcgaggtgaatactctgatcgctctcccagaatttcgctttgagattcctcttgaaacctctcttgaagcttctcttgctgccgattcatcacaagtaaaagtctatcaactctcttttggacaaatcattcatagcgaagttgtatcaacctctgatgcttttgttccagcacctttaacaacagctaaacgattgctgccaacagaccttgaccctctacatataattttgcgccagttaagacaattaaattttgtgctgtcaaatacctaaacgctcaaatgattgcaacaaaaaaccagcgctccttaaagaggaacgctggcaatgcgtatggcatttttcatctgaacgctgatacgtttattggatcaaatcataaatttccatggctacaatatcaatattatcaaattgataaggctgacttgactctgcttccgttaactcaaacgtttctgtggtgttatcgtaggtcactgtgcatttttctacgccttctttttcgaaacggcgaacttgaacctcgttgtcttgcgcttcgaccatcgcttctaaacgtttgatgatagcgactaattgcgaacttttcattcgtaagcctcctttttctgtccgttatattgtatcaaatcatattctatcttgcattgattttttacaatttattttgtcattttaagatttttttccatcttgccaccaaagcttaatcagggcttgagtcccatcactttcatagccagcttccgctaagcgatcgtacattttttttgccaaagccgtacttggcaaatccagtcccattttcgctgcttcatcaagtgcgatacctaaatctttgataaaatgtttgacaaaaaaaccaggtgaaaaatcttctttcaaaatacgggggctgtagttggccaatgaccagtttgcggcgctgccaccagataatgtctcaatgacttgcggaagttctaaacctgctttatcggcatagacgagcatctcagtcattccagtcatcgtgccagcaatcatgatctgattggccatttttgtgtgctggcctttgccggcagagccatgaagatgacacgtttttccgacaatctcaaatagtggttcaactttttgataggcttcctcgtcaccacccgccattatcgtcaacgttccattttttgctccaaggtcaccaccagaaactggcgcatcaatacttgccgcaccatgctcttttgccgtttgatagatttgttctgctaattttggcgtactagttgtaaagtcaactaaatattttgccgcgacatcggtttgaaaaattcccttttctccatagtaaacttcctcaacatctgcaggatagccgaccattgtgaaaacaacttcactttcagcagcaactatttcaggcgtatcacaccaaaccgctcccttagcgactaattcgtctgttttgctttttgtacgattatacacatttacatgatgtccgcttgctaaaaagtgaccgaccattgattggcccatgacacccgttccaataaaacctagcttcatagtcatacctccaaaaataaaaaaattcacgtctttagtatacgctaaaaacgtgaacttgactgcaataatgtttaatcaattgttcgtttaaatgatttcaatttgactttgaattttttcaatgtttcttcggtttccttgtctaggcgttctgtctcatagtaagcaatcatatcatggtaaaaagaaagcatcgattcaccaaagtgtgccgcagagatttcatacatttttcgtgctaagacactttcattcctaggaatctgctgttgataataatgaataaatgcagaagcaaaatcttgatcggtgtcaaaggtcacaccaagagatggatcatcgatcaatgtatttaaataatcattgccttcaacgactaaaggcgtacctgctgccattgcttctgtatacgtcagtccttgtgtctctgaagtagaagcactgacgaagaaatctgctgcatgataatagatggctacttcatcatttgcaacctctccaacaaaatgaacatggtcagacaagttcatttcttgaactttttcttccaatttttctttgtaaggccctttgcccacgatcactaatttggctgaaggaatttctgctagaatatcaggcagtccatcaacgatcgcttggatatttttctcataagaaatacgactcaatgataataacattggctggtcttcttcaatcgccaattcttgacgcaaggctcgtttcatttccagagtgatatccggacggcgaaatttctctacctcaataccagtgggaatgatgcgcatcggcgacacaacgccataactgcgtagtgtatcgatgacccgttcactcgggcagacaaccccagtagaatgattggcaaacagacgagagaaatactttacgtgtgtaggtcgcaaaacttttcctttcgcaatataatgcagataatcttcatacattgtatgataggtatgaatcacaggaatctgtagttttcgacccaccatttttcccagtagtcccgcaccaaattcagtatgggtatgaatcagttctagttccaactctttcgcaatcaaataggcataccacatgccccgcaccacgattctacggtctttgaaagacacgaaaggcacactaggcatacgaatgatatcttcctcatccatttctgcatttggatctgtagtcgtaaagatatagaccttatggcccttcttttccaactcttcttttaatgttttgatcgatgtcgctacaccgctcacttgcggaaaatatgtgtctgtaaaaaatccgattttcacaacggtacctccaaacttgccgtcaatcaacgggtttttcttctaaaacgctttgataaactttctttaactcttttccaatttcttcaatactccgttctgcagctgcttgatagccggcagctgacagatctggtacacgaccttctacgatgttagcaatttgttcaacgaactcatcaactgtccgtcccatataagaattttgattctcttgcaaccaaccatgataaacaggaatgtcacgcactagaactttctgcttactagcaagcgcctctaacacaacgatcccttctgtttcttcataggaaggaaagaaaaacagatctgctccagaataggccccctcaatgacatctcctttgatatagccaggaaaaataacattttcaggatggttttctttcacgagatctcgaaccgctttagggatcgtatacataggtgtatgtccaaaccaaataaaagtatactctggcatgcggcgagcaatctcaacaaaatcgacaattccttttctctcaaaatacaagccaacagaaataatcactttttgatccgccgacaattggaaatagtcgcgaaaagcctgttctttttttggttccggacgatatttgtccaaatcaatcccattagagatcgcacagatcggtaccttgatgccatacccttccaatagttcttttgcgtagggcgttggggttatcaattgatcggctcgggaatataaattgatcaaatattttttgtataatggcgataactggtttgagccgataaatgaatttcgaaaatcttcttcagtcgaatgcgcatggtaaattacctttttgccttgtttccttgctttattgatttgattcaacgaattgatcccatacgtattaatatgaagtatatcataatcctcagcttgtttgtctaatgtatattcaacaccgatactgctcagtgcacgttgctgatgcgcaagtgctctgccgataccagatttctctaaaagcttttcactttcaaaatagagaagtactttcaaacgagattcctccttctaaactgttacatctagtataacatagctagacgagaacaccctccaactcaaggcctagtttttgtattgatttctatcatacgtcaaaaagctggtttatcaaaggtcatcaaaacaatatgacaaaactgttcgctcccagaccacaaaaaaagcagcaagcgaattcgcttgctgctaacttttaactactttacatattgattgatcaattcgactacttcttccatcgtatcgcaatcttccaaagcacgttttgctaattcttgcatgtcagttgttgacaagcgtttcattaagctccgtgttttaagtacagaagttgcgctcatagagaattcatctaagcccataccgactagaagtggcacagcagtttgatcgccagccatttctccacacataccagcccatttaccttcagcatgtgctgaatcgattacgtttttgatcaaacgtagaatagatgggttatatggttggtaaagatatgaaacttgttcattcatacggtctgcagccattgtgtattggatcaagtcattggtaccaatactgaagaagtctacttccttggcaaatttgtcagctaagacagctgctgcaggaatttcgatcatgatacctacttgaatatcttcagagacagttacgccttcatcgatcaatttttgacgttcttcttcgtacatttttttcgcagtacggaactctttcaatgttgccaccatcgggaacataatacgcaagtttccgtgagcagaagcacgtaacagcgcacgaagttgtgtacggaacatgccgtcacccaactcagataaactgatacgcaatgcacgatagcctaagaatgggttcatttcgtgtggcaatttcaagtaaggaagttctttgtccccaccgatgtccattgtacgaacaacgactggtttaccagccattccttcaagaactgctttgtatgcttcatattggtcatcttctgtaggaaaatcaggagaatccatgtacaagaattctgtccggtataaaccgacagcttctgcaccattgttgtgaacaccttcaagatctttaggcgttccgatatttgcagctaattcaaagtgcttgccgtcagctgtaacggtttgagcatctttcaatttttcccattctgctttttgttccgcgtaagctttccctgcttcaataaattcagcagcttggtcttcagtaggattgatgataacatctcctaagattccgttaactgccagaatatcaccagcattcactttagctgtgatttcttttgatcctacgattgcaggaatctcaagagatcgagccatgattgctgagtgagaggtacgtcccccgatatcagttacaaaagctttaacgaagttgcggtctaattgcgcagtatcacttggtgtcaaatcgtgagcaacgataacaacttcttcgttgatcattgaaggatttggcaacgtcacatttagcaaatgtgccaagatacgtttcgcaacgtctttgatgtccgctgcacgttcttgcatgtatgcattgtcatccattgcttcaaacatgccgatatacatgtcagtgacttctttcaatgcagcttctgcattgactttgttatctgccatgttttgtttgatttgtccgatcatttcaggatctgacagaaccattaaatgagcatcaaatacttgtgcttctgcctcgcctaaagattgcgctgctttgtcacggatttgttgcaattccgctgttgactttgctagagcttcatctaaacgagcttcttctgctgccgtatcttcaacatttacttttgaaaaagataaatcaggttgtactaacaggtaggctttggcaacggctacaccatcactagcagcaattccttttagcatctcaaccattattcagacaaaccttcttttttcattgtttcaacgattgcagcgattgcatctgcttcgtcagcaccttcagcagtgattgtaacgtcagaaccttgaccaacacctagagacataacgcccatgattgatttaaggtttactgatttacctttgtactccaagttgatatcagagttgaatttgcttgctgtttgtactaataaagtagctggacgtgcgtgaatccctgtctcagcaactacgtgaaaatctttcttttccatattgatcaatctcctttatgatacggtttttttgtggtgaaggctttttttgactcagtcaattgtcagactcaaaaaaacgccctttcaactgttaagattaccatttttttctctgatagacaaccgttttctcttaagaaaacgactgaaatgaacctatatttgtttttatggttggtaccgatagatgatcttgccattcaagccagcctcgccgacaaatttcatgcggtcttccaattttaaccatgcttctcgaaatagcagaaattcggattgttctaccagcaattcgtcgatttctccagagcgcaactgttcaatttgttcaacaaatcgattttcattcatctctatcacctcttcatcttctccattataaacgattcttttttcagggaaaagttgtttccgtcatcaaagctgaaatccttgcagtctgaaaaaaaaattgtataataaagttatggtcagtaaaggtcaatgaaatttttgacgctgctgacaattattcaccgaatctgcaagtgtatctttttaccatgagtaaaaatcgcggtagaatgatagatgagcaaatgataagaaaggtcgtgaacatatgctttgtcaaaactgcggtaaaaatgaagcttctattcatctttatgccaatgtcaatggtcaaagaaaacaactcgattattgtcaaagttgttaccaaaaattaaaagcacaatctggaaatccaacaaatatgatggctcaggatcccttcggcttcggaaatcttgatgacctttttcgacaaatgtctcgccaaatgcaacaaggaaattcaccttatgaacaaacgcctccaactcaaactggaggaaacggcataatcggcggacaacctccgcgcaatggccaagcaccttctggtcttttaggcgaatacggcatcaatatcacacaacaagctcgagacggcgggatcgatccagtcgtaggacgtgacgatgaaattcgtcgggtgatcgagatcttgaatcgccgaacgaaaaacaatcctgtattgattggtgagcctggtgtaggtaaaaccgctgtcgtggaaggtctggcacaaaaaattgtcgacggtgacgttcctcaaaaactaatggataaagaagtgattcgcttagatgttgcgtcactggttcaaggaacgggtattcgcggacaatttgaagagcgaatccaaaaattgattgaagaaatcaaacaagccgaaaatgtcatcttattcattgatgaagtccatgagatcgtgggcgcaggggctgctggtgatggcaacatggacgctggaaatattctgaaaccagcattggctcgcggtgaattacaaatggtcggcgcaacgacattgaacgaatatcgcatcattgaaaaagatgcagcattagaacgtcgtttgcaacctgtccgagtcgatgaaccttctgtagaagaaaccatcagtattttgaaaggattacagcctcgatatgaagattaccatcatgtaagatatacggatgaggcaatcaaagccgctgctaccctttccaatcgctacatccaagaccgtttcttgcctgataaagcaatcgatcttctggatgagaccggctcgaaaaaaaatctgactattcaaattgttgatccgaaaacaatcgacaagaaattgcaagaagcagaagaacaaaaacaagctgcttctagagaagaagactttgaaaaagctgcttactaccgagatcaaatcaataagctgcaaaaaatgaaagaacgtcaaatcagtgaagaagaaactcccgtgatcaccgaaaaggatatggagcaaatcgttgaagaacggacgggcattccggttggcgaactcaaagaaaaagaacaaactcagttgaaaaacttagctcaagatctgaaatcgcatgtaatcggacaagatgaagcaatcgataaagttgctaaagcgatccgtcgtaatcgtgtgggattaggaaaacaaagccgtccgatcggttcgttcctttttgtcggaccaactggtgttggtaaaacagaacttgctaaacaacttgcctatgaaatgtttggctctgaagaatcaatgattcgttttgacatgtcagaatacatggaaaaacacagtgtctccaaactgattggttctcctcctggttatgttggttatgaagaagctggacagttaacggaaaaagtccgtcgtaacccttatagcttaattcttttagatgaaatcgaaaaagctcatcctgatgttctgcatatgtttttgcaaatcttggatgacggtcgtttaactgatgctcaaggacgcacggtcagcttcaaagacacattgatcatcatgacaagtaatgctggcactggaaaagtagaagccaatgttggttttggagcagcccgggaaggtgtcacacgatctgtcttgaatcagttaaataactacttcacaccagaatttctgaatcgctttgatggcatcattgaattcaaagcattaagcaaagaaaatctgttatccatcgtttctttgatgctcgcagatgtcaatcaaaccttagccaatcaaaaattgcatattgaagttccagaaaatgtccaagaaaaattggtagagcttggttatagtgctacgatgggggctcgcccattacgccgaacgattcaagatcatatcgaagatggtatcgcagaattttatcttgatcatccacaagtccatgatctacaagcaactttggattctgaagacaaaatcattgtgacagcaaaaactgttgacacaccagaagagccaaaggaacaagaaaaacagccatctgatgatgagtaaaatcctcgcaacagccagacatcgtaccttatttgtctagatttctatgccagacgcctgaataacctcaaaaaaaccaaggttttcaagctgtctggcttttctttttaaaaaaaacgccctataatattagtaaaaatacatagaatgtgaggtgagtatggtgaaattgatcaatgtgacaaacagccattctcgattagttatgaatcagcttgaaaataccgatgctgaaatggtaaaagtatatactgccggagacatcacagtcatctttacttctgccccaaatcacaacgaaatattgctgatcaacaaaaaacgtgcaatcaaacctaccgaaattgaagaaatcaaacattacttcttgaaaaaattaccgcctggttcttatgaacctgaaacgatctcagttattgaaatgccagatattgtagaaatttctatccaaaaatcgctttcttcgcaaacctaataccaatgaaatcactataaaaaaatatctataaaagatgactgtcacagccctcttttatagatatatttttttgacttatttatcgttgcccctgcgaaacaaacaatctttaagtaaaagcatctgtgccatgactcaatcaacagatcgatcctaactaatttttggggggcactttcagatcgaattcgccgttcgatgatcctcccattgataaatatccctaaccttttccatgtttcactgttatggatatcctcaagaaagaaaaaacactgattcttttttgattcaacaaatcgatcagaaataacgatatctgcttctgcaaggttttctaccatagttacagtttcctttttatatacacctgttatataattttttactaacattacatagttggcatgagaggtaatattaatcatgacattcaaaggttccgccatcacatgtccaacataggagtatagtagctctgttagttgtgtactaaatatatccaaatctctttccgctatgctttttttgtaaactgattttatcatctcttttatttttagaaacttatcgttcaacaacaatttcttatcttcgtggtaaaagaaggaacttaaactcagcttatccgtgatcaaaaaacgatatacaagatgaaaaacaaatgtgctatgaaggttggcaggaatactgtaactctcctccattttcttcaaagcttcacatgcatgatctacgataggctttccagataatttcattaatcgcttctccaatcgttcgcagatttcagatgtcaaatattctggaaagaaataaatagcgaaaagatagtaaaagaatttttctgactgataaatagaatgattgatctttttatctaacggataaaaagtctgacaaaatcctagtcggatttcttcatataaacagtcgcttatagccgtctcttcttttgaatctatatcagtataacttcctattttatgggcatccataaaaactctagttattctagaaagtttctcttgcttgatcctcgttacattcttttcgttatgatatctataataattgtcctcagcaaatgtcgaagaatgtgtattcagaatataggaaagtactcgtatctggctttccttaccttccacaactaaataattcattttcttcctaatctggcaatcgactccaatcgttcgaatgatatcggttgctttattgactaatttgtaacaataagactgactataattaaattgcattgataacttgaccatccctacttttcgatgtttaagaaagtaattcaggacttggaaaacagaactttgtctaatatactgtatctttaaacttgaatacaaagacgtaaaagtttctggggtctctatgtcagaaagtctaaataatctattttcaaatttaaagagtgagtcggttatattcagttctactatgtaatcctcattgatctgcataatcaatgacttcaccttgcgattagtcagcgaatgcttacaagctagttcatcaattgatgtttcagtctttgaaataatatcctctaacaagtttaatttttgttcttgcctctctgtcagaaacaacttccataaatccatgatgctctcctttttaatgatagttacttcgataattttgtctatctctgaaacgaaacaattattaagtacagttacctattggggagcgtcaataattttgtgtaaatgattcttccctactgcagattgtttctaattctcaatcagttggcttagcatttgttcaagttcgccttcggcctgttgaaagcctttatgactgcgacctaggaatttttggttgtaagtatcaaaagacgagactaagaaacgttccatcgactcttcgttttggaactgttccttgcggtggctgtatttcttgatttgcttattaaaggattcaatcaagttcgtagaataaatactcttgcgtatggccaaggggaaatcatagaaagtgagcaagtgatcgttcgaaagaatcgattcaaccacttttggatagctggttttccatttttccgcaaaagcaccacgtgcttccaacgccacctctttagatgaggcttgatacaccattttaaaatcatcacagacttccttacgatcatcgacacgcactttgtgactgatattacgggaaacgtgtacacaacaatgttgaaaacgagctttgggatagaaccgactaatcgctcctaccatcccctttaagccatccgtgatgaacaggaggacatttttcaaaccgcgctcttgaaggtccaataaaatttcctcccaaatcgtgatggattcagtcggtgcaatcgcatagctcaatacttcctttgatccgtccgggcgaatgccaactgcgatatgaatagcttccttggcgacggttttccgctttaacggaatatacgttgcgtccatataaatagcagcataacggtcatgaagctcccgccctttaaacgccgttacctcttctgtaaatgattttgttatattggacatggtttggggcgtgtagtaatgcccatacattttctcaatcaagtctgcgatttccgacatggtaataccttttcggaagaggtgaatgacggtctcctctaacgtgtcattcgtccgtctataagcaggaacagtctgttgcttgaactcaccattgcggtcgcgcggaatctggagatgaagttccccatactcggtcttgaccgtacggtcataggagccgttacgagaattacccgtgttaaaaccaatgcgatcatacttttcgtaatctaggaaagccgttaactccgttttgagaagcgtattgactgctttctccaaatggacacggaataattcattcaaatcgcctttgttcgctagagtctttagaatttctgtagtaaaatcgttcatagggaagtcctctcttctgtgaatgtgttgtggtaactctattctacagaagggacttccttttttctatttacacaaaatattttacactctctccaatttaccttcaattggtaagagttttacgtacttctttaaatcataatctttatttagcaaattgtttgtttccgcaacataagtcattgaagtcctagttgaaacagcgatactaggaaaaaccgatacttcaatggcatgactttcatgattagtaacagttgctgtataagtatacttttggttcagatcaggcgaaaattgaatatcttttactatacttgaattcttgtctgcttggatctgaacttcaaaagaagagccaatcgattcttcggccaatgcttctggactgaaaaaaaatattcctaagcacaggaacaaaagaaacaccctaaaagaataagattcattcttgtagctaggatataacatacgattaaggagtgacgtctgtcacttctgatgcagttagtgtgattacgtaatcacttgccttagtgttgtcaaaagttgaaggatcaattgtataatcaaaagtaccttcttcagtcgtttcatagccttgacttgcttcaactttgaatacttcactcgttgcaatcgttaaaccaggtgctgaggtttctccaggaactgctgctgttatcactacttgctttgctccaaatgacttattcgttaatgttccagataacgtgaaagtacctgttagcggattcgctttcgtttctgtgaaactaatatctgcaaaatctacagtttttgtttcaacaggagtagctaaagtaaatgttgctgctccttctgtgacatttacagtaactacttcaaactatttgaattcttacagaatagttttgccaaagaaagtgccggagcatatgatgccggaaacaatcaactcctttctgaatatttaagtgaccattcaccggatgggaaaatcattttcttagcagctaatcctgatatacctatcaaagggctcggaacgcggctgctaaatgaactacagaaaagagtgcaaggaaaagaaatttatctttttacagatagtgcttgtacgtatcaattttatgaaaagcgcggttttcaacgtcaaaaagaaaaaaagatttcattaaaattgcccaacaaaaaaattgatcttcagtgcatgctctatagcaaagtgattgacaaatgatagccatgctacgcaacaaaaacgtttttcaaatgagtgcaaaaaagcacagccctaatggctgtgctttgctaatgattggaataaaaatttatcccctgttcggtatcttctacataactatgcgctggagctttagtcactaaataacaaaaataaaaatccccaatacaggctgacccatgaaaagaagccaaccagacaaatgcataaggagaaatttccctatacgcatacaacagccataagaccaaagtgatcaagacaaaaggagcaagcaaaataagtaaaaactgccaccttgaataaaaggaattaggacttgttgcataggccaaaccattcttaaaaccaaatttgacttttccttccttattgaacagcttaaaaaaaatcccgtgaatcaattcgtgaacgatgattaaccctgccattgatagaatggcaataacgagatacattaaatcgatagtgacttcttccgttaactttctatctaatgttaaaagcgtaaataaagcaaagaaaataaccaatagaggaatcgttaagatattcagtttcatgattagctttttatcgtcaagcaaattgacacgcttgattaatttcataatgacccccttactcctatttgcaacactataagcgctcgtctcacgtcataaattattatatcagtttttttagaccaaaacaattcgattttttactgatacaaaacaaaaaaacattcttatcaaaaacgataagaatgtttttttagacaagaaccaactcatttctcgctcccatcatttgagaacacttgccgtcacaagtactagcagtgttttcacatcaaacttttcaattcgacatctggatatttgtcggcgaaccaacgcatcgcgaattggttctcaaacaagaacaatggctggtcgaaacggtctttggctaagatgttgcgacttgaactcatcttttcatccaaatctttaggatcgatccaacgagcaatcttatgtcccattggcgacatgatcacctctgcattgtactcgttcagcattcgatattgaaatacttcgaattgcagctgtccaaccgctccaataatgtattcatcactgagatacgttttatacaattggatggctccttcttgcactaactgatagatccctttatggaatgatttttgtttcataacatttttggctgttactttcataaagagttcaggtgtaaacgaaggtaattcttcataggcgactttcaatttcccttcatataaagtatcaccaatttgataatttccggtatcatataccccaatgatgtcgccggcaacagcttgctcaatattttcgcgagtgtctgccatgaactgggtcacattacttaatttcatttttttgcctgtccgctcaagcgtgacatccattccccgttcaaatgttcctgagcaaatgcggacaaaggcaatccggtcacggtgtgcggggttcatattggcttggattttgaaaacaaatcctgaaagctcttgttcgtatggactaatttcttctcctgtccttgtcttatgtccgtaaggtgctggtgcaaattgtaaaaatgtttctaagaaagtttgcacaccaaagtttgttaacgcagagccaaaaaagacaggggtttgatcaccacgagcgattttctcttcatcaaaggaatcgccagcttcttgtaataattcgacttcttccaacacttgttgatagacaccattttgattcagcggatgatcttggggaatttcaccgttttgattaaatggaatcaggcgttcaccgccatgagattctggacgataaatttcaacccgttgattgtgaatgtcataaagtccttcaagcccttttcccattccgattggccaattcattgggtaggactcgatttgaagcaactcttctagctcttctaaaagttctaatggttcacgaccatcacggtctaatttgttgatgaaggtaaagatcgggattccccgtttttttacgacttggaaaagctttttcgtctgtgcttcgatccctttggcactatcaataaccatcacggcgctatcaacagccattaacgtacgatacgtatcttcagagaaatcctcatgtcctggtgtatccaaaatgttcacacgttttccttgataatcaaattgcattacagaactagtgacagaaatcccccgttgtttctcgatttccatccagtcggatttagcaaaattaccggttttctttcctttgacagttcctgcttggcgaattgctcccccaaatagcagcaactgctcagtgatcgttgtcttcccagcatccgggtgagaaataatcgcaaaggtgcgacgactttcaacttgttgttttaaatttggattctccatgttatgtagttactccattccttgaaattagaactctctgtgtctatacaaagattttctgaccaaatcagtatatcatgtatcaagagcggaaaaaagaaaaattacagacaaatgctctctatcattcagattcgaaagtctagagagcaactgtttaagcagcttgatagctatttgtatttatacgagaactgctgtgaaagcatgaaaaacactcaaaaaactaaaaggctggaattaatgtatcactatgctcattttccaaaaattctttgactttatcgctggtcatcgcttttcgcaaaacattgattttttctgaatcttgattgtccttacgagcaactaaagagatcgcaaaacgatcatctatcgttttctctaagaacaaggcatcgtcaggctttagaccaattttggcgatataggtcggatagttgtagacaagggagacatttggttcattataggcttctgctagattcaataagtccacagacaaccattcaaagtttttaggattcgcagtaatgtctttgatcgtaccattgactccaactccatcttttaattcaatcaatccttgctcagctaagatggctaatgctcgtccttcattagaaacatcattcggcagagcaactttcgttccttcaggaatgtcttcaatttttgtatactcttttgagtaaaagcccactttagcattataaattttgtctaaagccactaaatctgctgatttttcctcattgtagcgttgcatatacggctcatgctgcgcaaagtttgcgtctacttccttattattcaacagctcattgtattgaatattgtcatttacttgtaccaattcaattttccagccatcttctaccgcatcggctgctactttgacaacatctgtcataggggtcgtttgagaagcgactttaatcactttatcctctgattgcgactcattccctgttccacaagcaccaagaaacattactgctagtactaacccaaaaaatattccttttttcattcctactcctactttcttttatcaactttttttgctaacccattcccaatcaactgaatactaaaaactgctacgatcatcactaaaatggaaaaatacatgaccccatattcgtaccgttgatatccataacggatggcaaagtctccgattcctcctccgccaacgattcccatcactgtggaataagacaccatactgacgatcgttgtcgtcagagacaggattaacccgcttcttgcttccacaagcaaaaattctttgacatattgataagtggagacacctaatgagcgtgccaatagtccgacatcttctgggacatccaacaatacctgctcgactaaacgagcatagatgacgattgacacaatactcaatgggatacttgctgggatcggcccaaacgagctgcctaacaaaaaacgagtgacgggaatcatcgcaacaacaaacagtaaataaggaaacgaacgaatgaccgtgatcagcaaatttaatatttgatacaaaatcgttccctgattgttgttttcacgactaataaataatagaatacctaatggcaatccaatcaaaacagcggcgaagatagagatactcatcatgatcagggtttcttccatcgcctgcatcaattctggtaaatagtattgaatactctcaattatcgtcatgctttagactccttatcacacgatcgacatagtttaattcttctttttgtaaaagatgcggcgtattcgctacttccgctacgattcttccttgttccataacatagacccgctcacaaacttgtcgaaccgctgacaattcatgactaacaaacacgattgtaggctggaaagtgccatgaaccttttgcaataacgataaaacatctcccttagtatcttcatccaatgcactggtcggttcatcacacaagaggatctttggttctttgaccaaagcacgggcaattgctactcgttgcttttcccctccacttaaagaagcaggataaaccgaagccttttcagacatacctacgaagtctaacgtttccatcacttgtcgttgtgattttccagctaattttaaaggcaaaaaaacattgtcgtagacagtcagattatggagcagattaaattgttgaaagatcatcgcaatatcttgctgtagacttcgtctcattttcttggtcaatcctgtcgtgttcacgccatcaatcacgatttcgccagctgaaggagattcgatcaaattaatcagacgcaacaaggtagacttcccggaaccgcttttgccgacgataccgacgatctcattgctgattgttaacgatactcgatcaaggacattgtcctgatatacttgtgaaacctcttttacttcgatcatatttggttcctgacgctcctctgccttcaaactcaattgaaaagtagtgatacaaattgctcatttgtcagttgatggatatatttcgcgacttccatcccttgaaaatgctgccgcaactcttcattataaggaagaccaatcagctgtttttcgagaccagcgatatcttcttcgccaaaaaaatctccagtgatttgtgcttctgtgattttcccctttgccactgaaaagcgtagttcaacgataccaacattttcaaaacgtttgcgtttcgtccattgataattcggggcttccccataaatccattgatcattggcatatcgcaattgatacaactgattaatcttccgttgatcttcagccgttaatttgatttctttttcttggatttcctcaatgttgtcgacgtcataaatatgacagagcaattgatctctaaattctttcgttgacaattgttgatattcttcagaaagataaggcttgatgttggtcacacttttacgcactgactttgttgccttcgagtcgatcttttcctgtggaacgttcaacacttttgtcaaaacgcttaagtcaacatcgaacatcaatgttccgtgggaatagcttctgtcattttttgtgtacatggcgttaccagaaaatttctttccttcaacaaacaagtcatttcttccccgtacttcaacctcttttgctcccatcttctgcaatgctttcaaaataggttgggtggctccatgataatcaccaaaatgagtcacatcttttttagtcacaaagctaaaactcatgttgcctagatcgtcataaactgctccgccaccagaggttctccgggttaaaacgatgtcattatgtcgtaaatagtcaaaatttatttcttcgtaggcattttggtttctaccgattataacacaaggcttttgtatgtataacagcaagcatggttctgaaatatctacgttattcattaaatattcttcagtagctaagttcatccgaatatcatcacttttcattcggtaaaatctcattttcccaccccacaatgatttctagttatcgcactcttatactctctttaattcacaagaaaagcaagaaatatgcttagttattttagtttttttatctagctaaatctgtatcatttgattaactcattctgttatatattatttttagacaaaaaaatgcttgaagcatttgcttcaagcattcattttatcgacgaggttcgtcttcttcaaaatcttttttgaaatagcggcgttcttcttcaggttcgacagctgtttcttcaggatcatggaagataacgcggatcttcaatacacgtgacccttccatttcttctgtaatcagtgtgacgttatccactttaaaggataatttctctccttcatcaggaatcaaccctaaagctgtgatcaaatatccggccattgtatcaacatcactcatgtgcaggctcatatcaaatgcttcattaaagtcatcaatcaacattcgcccttggatgatgtactcatgatcagaaacttgttcatataattcttctacttcatccgattcatcgtcgatctcaccaacgatttcctctaagaggtcttctaaagtaaccagacctacgacaccgccgtattcgtctaataagatagccatctgattttgagtctttttcaactcatagagtaagtcatcaataaaaacagtttcaggcacaaataatggttcttggaggatttgtttaatatctaatgtttcaaatccatatttataggcacatttcagcaggttttttgtatgtaaaatacctacgactttgtctttgtcctcattatatactgggattcgagaatagttttctgctaaaatttctgtcaaaatttcatctactgaatcattgatatcgaccataaatgcagtagtccgcggcaccatcacttcacgggccaccttcgtatccaatgaaaagattccttgtagcatttccaattcatcttcttcaaagacaccttctgtttctaacatataccgcatttcatcacgagtcatttttgtatcttcatcatcaaattccattggtgtgattcgagctaacaaactagttgaagcggaaagcaaccacacaaatggttttgcgatcgtaccaatcacacgtatcacacctgaagtaaattgagcaacttcttcagatttgttcattgcgattcgttttggatacaactcaccaaatacgatcgaaacataggtcaaaatcgctaatacaatgatattagccaggctttttgctgcagctccgccacctagaacgggtgctaagcgggtagatagcgtatctgccagtgaggcccctgataagatattgactaatgtgatcccaacttggatcgtcgacaagaagttggtgggattgtcaatgattttcaataatttttgtgatttgacatttccttcctcagccttctgttctacacggttcttattaactgaaacaaccgcgatttctgaagcagccaagaaagcattgatcaatgtcaaaacgatcaataataaaatttgcgctaatagcgactgactctcggggtcagcattcataatagcattctctccttatttttacattttctaaaaaaaatcgtgggctatacccacgataaaatcgtatcataaagcttttttctttgcaataaaaaccatcagttatctagttcgatcaatttctcttggtttttcttgcttttatcgtcacgaatcaaacgaatcacaaaaatcacaatcgtacgacaaatggcgtagaaaggtactcctaagaaaatacccagtaatccagcgatgttccctgcgactagcaacactaaaataatggttagcggatgaatcgccaatgactttccgattacattaggatagatcacattaccatctaattgttgaacgactaacacgactacaccacataacagagcccggaaaggatcatcaaagattgtcactaaaactgccggaatcaagccgaggtaagggcccaaataaggaatcaagttagtgatccctgcaatgacaccaaataaaaaggcgtaattgacacccactagccagtagccgataaaggtaaaggtcgcgacaaaaatacattcaatcgcttgtccgctaatgtaattggacaatgttttattcagatcacccaataactcgatgatttgatttcgtcttttttcaggtaaaactgattgaatatttggcacaagtttctcgccgtctttcagcatataaaacaagatgaatggtactgtaacaatgatcatcgttgctgaagcaatcgttcctacgatcgatcccaaacttgttgacagcccacttagaaattgttgcagcaatgaaccataggaaagattgagattttctaactgttgcgcaaagtcgatctgtttaaatactgggtcatctgctattttagaaatccaagtctccatatttttagcaaaagtaggaatattttctgcaagttgtgaaatttggttgatcagatttggaatcacgcttacgactgttaggacaatagctgctactaataagagtaaaactaaaatcacagcgtagattcttttgatcttagtggtcttcatcagaaaaacgacgatcggattaagcagatagtacaaaaagcctgcaattaagaccggcgcaaataatgtcgaaaaaaatgttcctactggtgcaaataagaaattgattttgctcaataccagagctaacgtggcaagaacgagaatttctaatgaccagaagaaaagttttgattgtttgaatttgtcgaacaaacgattccctcctttttttcactattatagagtattttgcaaaaaaaagcttgcgactttagccgcaaaagcaatttttcttttcgtaaaaatggtatacttagaaaataattgatgaaataagaaggtggttgattttatgttcgtcgcacaaaccaaagatacattaagcgaaatttatctggactcgttgaaaattcgtaatgatgtcttcgtcaaagaacaaggcgtgcccttaagtcttgagatcgatcaggacgaagcaaacgcggtccattttgttctctacaatgaacaaaaagaagcaacagcaactttgcggctgcttcctatagatagccacacattgaaacttcagcgtatggccgtacccgtttcccatcgcaaaaaaggcttcggacgaattttgatccaaggggcggaggattttgctcggaaacaagggtttcaaaaaatcactttaggtgctcagctaaccgcaaaaggtttttatctttctctaggctaccaacctgaaggggaagaatttcttgatgcggatatgccccacatcaaaatgagtaaatatctgcagaactaagtatcttaaaagctgtcaatcacttataactcacgtgattgacaactttcgcttctttatagaactggatgaatctcctttaaagaagccccgccttacaaatcaatcactcgatgacaggcactattttttgatacaaaaagactcgacttcgaattaaagtcgagtcttttgcacattgaagtgaccctttacggctactccttgctatttctgagacaactgcttgtagcgatcataccaaatgtccacatacccctcagaaaatggtcctttgccattattgatccaatctactaaaattttgacattttcttttaaaataaaatcaatgtcctgcggataatgcatgatcttgctatgaagctcatattcatccacatctagtaaacgtttctcaccatcaggaaatactttgatatcaaggtcataatcaatatatttcaaggcctcttcatcaagcaaatacggtgaagcgagattacaataataggaaacccccttttctcggatcattgcgattacattaaaccagtattttttatgaaaatatacaatagctggctcacgggtaacccagcgtcttccatccgattcagtcaccaatgtatgatcattgacaccaatcattgagaattcgctcgtctttaagaccatagtatcccgccacgttcgatgcaaattgccgtcatgtttgtagctttggatgctgacaaactctccttcttttggaactcgcatagcaacccttccctcagcaagaaaacttgcgttttgtttgggtgttcattacaccgatatcgtaaatattatagcaataaaacaaccctttgcctagaaatgtttatcgactttatgatttttcttcaattgttcgactaatttcaactgaggtttgggaaagacatactgttcaaattcttctggcgcagcccattgactgtgttctaacgagaattccgacggtgtgcgtccataaaaaagcagtatgtgccatttcaaatgactaaagatgtgagtaacctcaccaagatgtcttttttgccaaacgacgggaaattcagggaaaatcggagctggttcttctgcaactgcatccaatgttaactgttggtcttgccaataagccaataattgcatataggtcgcctgatccacttccaaaagcggaaaatgccacattttggctaacaagccagtttctggtcgctgcaccaataaaaagcggccatcttcttcaatagctccagcaatgtaatacatatcttttggcttcgctttttttgattttacgggaaagtcggtttgtgttccctgctgataggctagacaatattcttgcagtggacattcctcgcataatggcgaagtcggcgtacaaatacttgaaccaagatccatcaaagcttgattgaattctcctggctcatcgtgagaaatgattgtacgcattgctttatcaaagactccgcgagaacttgctttagctatatctgcctcaatacaaaacaaacgactcactacacgcatcacattgccatcaattgcaggttccggcaatccaaaagcgatactgccgatcgccccggcagtgtaaggaccaatcccctttaacgaacgaatatcagtgatggtctgtggcatctctccatcgaactctgccatgatttgttgagcggcagcttttaaattgcgtgcacgagagtaataacctaatccttcccaagccttcaaaagcttctgctcttctgcaccagctaaatctttgatggttggaaattgttccataaagcggtaataatagccaatgacggtgtccactcttgtttgctggagcatgatctccgagatccagattgcatagggatcgttggttgctctccaagggagattccttttttcatcatggtaccaattcaaaaacttgtcttggaaagaacgaatgtcctcttttgaccacttttcccactgtttattcatccataacttcctcatctaaaaattgttggatcgcatccagagcgaaacctttttggtaaagaccttgtttgattttcatttttcttttattcaaaggcaaccgctgatgtcttcgcaaaagtcgttgaccctctttttgcaaagctgcgttttcctcttcgtcgcctctatctgtaggcagttcatctaaaattaattggataactggttgtctaaaccctttttgcattaggtgcagcgatagtttctgcatcatctctttgtgacttttcccttggaaccgacgcaatgctttttcggcagtatgatagccgacatcaaattgcttttcttctgtatataacggcatcacttcttgaatcacttcttcagacagccctttttgttttagttgctgactgatgactgatggccctttgtctcctaaacggatttgtgtccgcaagtagctttctccgtaggtacggtcatcaagtaaatttagttctttcaatcgctgcacgaccaaatggcgatcctctaaattgatttctttgtcttttagataggtacgaacttctttttcggaacgtagttgatagctaatgtaattcattgcttgctgcagcccaatatcaaaaccggagctttttttgatttcggtcaactcttcttccgtcacttcttttccttttagaagacggaaacgaaccagaagatcctcagaaacccgcaaagattctccattggagcagtctacttcgtaaaagggaccttttcccttactgatacgaatgatcgttatcattttcttcacctcacgaacgtatattctagtttatcacaaaaaaggggaaattccttcaaaagagctataaaaagtatggtaaaatagagagactatttatcgataaggagcaatcatggcaaacgtacaacttaaaaacggtcaaaaactacaactgacgatcaaacgtttaggaatcaacggagaaggaatcggctattataaaaaattgatcgtctttgtcccgcgagttcttccgggagaagaagtgattgcagaagtgaccaaagcaactccgaggtttgcagaagcgagaatgaccaaaatcatcaagaaaagcagcgaccgtattctccccccctgcaaattttatgatcgttgtgggggctgtcaattacagcatcttgtttatgaaaagcagctagactttaagaaagacttattaaaacaagcattaaccaaatttaagcccaaaggttatcagaagtatatcttaaaagatacgattggcatggaagaaccatggcactatcgcaacaaagcgcaatttcagttgcgatatgatacaaaatcaaaacgaatcgaagctggtctttacgaaatggattctcatcgtttagtggcgatcgatgattgtctcgttcaagaaaaagcaacccaagatgtgatcaatggccttgtgcagttactgaacaagtatcaactcccaatctatgatgaaagaaaaaacagcggcatcctgaggactttgatggtcagagtgggcagagcgaccggcgaagtacaagtcgtttttatcacgaactctagcaaactgccacagaaaaatgcgttgattcgagaaatcaatcaacgcatgcctcaagtagtttcgatcatgcaaaatgtccaaaacaagaagacctcggtgatcatgggggatgaaactttacatctctggggaaaagaagcgattgaagaacgattgcaggaattaacattcgacctttcacctcgtgcattcttccaactgaatccgcaacaaactagtatactttatgacgaagcaatcaaagcactggcattgacaaaaaatgaaaccgtcgttgatgcctattgtggtgttggaacgattggactaagcctcgcaaaacatgcaaaggaagtccgtgggatggacatcattccgcaagcaatcgaaaatgccaaagaaaatgcccgccgaatccaagcaaataatacgcattatgaaacaggaactgctgaagacttactccctaaatggtttgctgctggttttagacccgacagtattgtggttgatccccctcgaactggattagatgaccacctgttgcaagcgttagttgctcagcccccaaagaaaatggtttatatctcttgtaatgtttcaacattagcccgtgatttggtcaaattagcgtctgtcttcaagattgagtatttacagtctgttgacatgtttcctcaaactgctcgttgtgaagttgtcgttaaattgacgcgtatataaaaagcctagccatcttcaagtaaatgaagatggctaggcttttttaggaattcagctagtatccaaacacacattgttggacactagctggatcaaatcttattttgtgactaaagcatcaaggctggctactgccaaactcattttggcgatcttatccaataatgcaaaacgattgcgacgtattgcctcgtcatctaccatgaccattgtctgatcaaaataagcttcgattaatggtctcaatgaaactaggctttgatagttttgttccatcgtttgttgcgggaacttatcttcaatggcgaccactgcctcataaagcgtattttctgattcgttctcaaacaattcaggattgatttgtttgtgttcaagatctgccttttttgcaagattaatgacccttgtcaaagcttccatcgaaggtttgaaatcagaatcattcaaatgtgctctcaacatttgagcagcttcaaacaaaagactgatatcgccttgacgagagttgatcactgcttcgatcacatcatgacgaatgtttttcgttgctaagaattgacgcagacgtccgtcaacaaaatcaatgacttgctcttgtccttcgttcaattgaatgccatagactgatggctgttcattgattgctgtgcggattttttcctgtaaacgggctaacgggaagtaccaacgtttctcagcaataatccgaatgatgccataagtttgtcggcgcaatgcgtatggatcgttcgatccgcttggaatcatgcccactgcaaagaatgacagtaaactgtctaacttatcagcaattgctaaaattgctccaacgcttgattcaggtaacgcaccttcagcagagacaggcatataatgttcacggatcgcttgtgccacttgcggtgtttctccttgcaagagagcatacttttcacccatgactccttgtaattccggaaactcaccgaccatattcgttactaaatcaaacttatagatttctgatgcacgtttcaattctgttctttcatcttcagacaattcgacggtttctccaatgatttgagcaataacagctacccgttgcattttttcatataagctaccgattttttcgtggaaagtgacttgttttagtttctccacacattgatcgatggtaagtttcttatcctcattgtaaaagaattccgcgtcttctagacgcgctgtcaatactttctgatttcctttgactacattatcgatttttacccgatcgccgtttcttgctgaaatgaaatggggcaacaaaacaccttctggggtgcgcacatcaaaataccgctgatgttctttcatcgaagtgactaagacttcttctggaactgaaagatatttttcatcaaagtcaccgacaaaagcagtcggatattctaccaagttgttcacttcttctaaaagatcttcatcaagatcgatccgccagttgttttctttagcaattgcctcaatttggtctacgatcaattgctgtcttttggatggatcagcgatcacgaattggcgttccatttgactcaaatagtcatcggcagtttcaaaggtgacttcttctccaaggaaacgatggccacgggatttccgatctgttactacgtcaaggactgtaaatggtacgacttcagcgccaaacaatgctacgatccagtggattggccggatatactcaaaatcgaaatttgcccagtgcattgttactgggaacaccaaactagtaatgacctctttcaaaccagttaaaacttcaagcgctggtttaccttgaatatgcttggtgacatagacatactccacaccatttaattctttgaaggtaattgcatctgtggtcaatccttgtccacgaacgaacccttgggctgcttttgaccaattgccatcggcatcgattgcaatttttttggcaggtcctttcacttcttcttgcgtatcagcttgactttccggaatcccagtcacatatacagctaaacgtcgaggtgtagaataagcttcgatcgaactgaattgcagtgcatgagctgtcaaaaactccgccgttttttgttgtagctgtttcatgcttggcgtgacaacatgtgctggcatttcttctaaaccgatttctaataataggttttgtgccattttatttccctcccgcaatcaatttttccgcttcttctggtgctaataatggataacctagtttttcccgttcagcgacaaataacttggcaacttgtcgtgctaaattacggatacgagccaaatatccagcacgttcagttaccgaaacagctcctcgagcgtctaacaggttaaatgtatgactgcatttcaaaatatagtcatatgcaggatgaacgaggttttcatcgatacagcgttttgcctctgcctcaaagcggccaaaattgcttaacaataactcttgatcgctgacttcaaaggaatattttgaatgttcaaattcaggctgacggaaaatctcgccgtatttgacccctgtcgaccattccagatcatagacactttcaacttcttggatataagatgctaaacgttctagtccataggtgatctctgaagtaacgggtttgcaggccaatcctccaacttgttggaagtaagtaaactgagtgatctccatgccgtctagccaaacttcccaacccagaccagcacaacccatagaaggattttcccagttgtcttctacaaagcgaatatcatgttctagcggatcgatccctagcaaacgcagactttcaaggtataattcttgaatattttctggagagggcttcatcaccacttgaaattgatggtgctgatacaaacggttgggattttctccataacggccgtcagccggtcggcgagacggctccacataggcggcgttccaaggctccggtccaattgcacgtaaaaaagtatacggactcatggttcctgctcctttttcggtatcatacgcctgcattagcatacagccgttatcagaccagaacttctgtaaagtcaagatcatttcttgaacggttaatttactcattattttcttcctttcttacaacgcattgactactggataaaattcaacaacatgacctggaatcaattttacttcaacaacatggtcatccgtcaaaacatctgacaaatcatacaacatttggtccggttttgttgttaactctttgactagttggtcatcttgcttgactaagatttgcaatggaatacttgctaacacttttaattttttttctttgaattctgatgcagcaatcgtcatatcaaatggcatgagagtcccctccttttctaagtcattgattctaccgcaaaggttgagtttttcatgaaataggacacaggtactacgttctccctgcgagcctactgtttcacatctgctcgtctcttctgtgttactcctgcagtcacttctaccagcagggttcgctaacaaggacttgtatgtcctgttttacaggtcgatcacagtgattcgagcaatggtgaatcacaccaaaaaatccctatacctatacttgcgcatagatatagggacgatattctcgcggttccaccctacttccgattactcggcagcttcattgagtcatactcccggatgcctgcgaaaaaaggattcaacttggctttcactatcccaagctcgctggatgactctggcttctttcttttttccgatcaacgtatttatttgattatccttatcatagtagctgtatagggactttgtcaatcaaaaaatataaaagcaattaattagggcctaagtccggctgatcgtgaaagatgatcatatctgatacccgaccgtcactttcaaaaatcacagcctcgttgtttccttctcgtaaataaggagctggaatatataaccgtctttgcggtcctctctcccagaaacgaccaatattatgcccattgatcataataaatcctttgccccagcccggcagttctacaaatgtatctgcgcattcatccacttgaaagctcactttggagaaactcggttgtcccgtttgccagtgaccggaaaaatctacttgatcaagattatccatcggtagactgtatatttcccattcactttgaaacgcaccgttgacgatcactccgtctttgatacctttgtattgatgattcatttggacggagtaattgacccgtcccatgttctcaaccaagatccctaactcatttgactcctccgtcagtgtgagagtcttcttttgtccgatttcctgatcatattgaataaattgcagctgattattaataaacgtatgggctcgatcctgacaatggatcagtcgatagtcttcgatcacacgcgatttgccaatttgcgaacgataatagacatagccagtagcttgatctaacagttccatcgttaaaggataattgtgcttgactggttgactgatgctagctagtgtctcaaagagagaaactcgctgactaactttccagctaccataagcccgtttggtgatttttgtagtcaaaggaaaggatgggatttcggtaatttcacctatgacttgttgaaatgcttcatacttaggtgtcacatcgccccattccgataacaacgcatcatagtcatagctagtaacgtctggtgataatttctcataatagttggcaccattcataaagccgaagttcgtgccaccatggaacatataaatattgacggagccagcttctaagcagtcccgcaattcattagcagcgtcggttaccgatgtggtatggtgcttgtcatctccccatgcatcaaaccagcctatccaaaattccatgaccatcaatggctgcttcttcccatggaattcttgaagttttctaaaattctcctgaatgtctgatccacagttgatggttggcagtgcgatgtccttgatcgaaccgttctctaacatatccagccaaggaccatctgacgtaaataagggcacgtcaatgccattgtgacgcattagttcagcagactttcgcaaataacttttgtcatttccataactgccatattcattttcaacttgcatcatcaaaattggtccttcttgagtgatctgtaaatcactcacttgagaaaaaagctgtgtaaagtatcgagcgatcttttccataaacggtggatagtcaaagcgaatcttcatgaagggatcttttaacagccaataaggaaggcccccgaattcccattccgcacaaatataaggtgctggacgaaggatcacatacagccctacctcctgtgcaagctgaataaagcgccgcaaatcaagattatcgctaaagtcaaactttccttcctgcggttcatgcatattccaaggcacatacgtttcgactgtattacaacccatcaaacgtaatttttctaagcgatcccgccaatatgcaggcacaactcgaaaatagtgtatcgagccagaaataattttcatgggctgatcatttaaataaaattcgtctttgattacaaaagcagtcattcgcttcttccttccttgattacatatacactgtattgatctgcaacggagtcttcagtcaaatgcttaccggacagtaggtccttctttcctacaaattgtgccggcaccttttgcgcttgcttctgaaaattgatgataaaatagtaaaccgcttcttccgtatgacgacagctgatttctagatttgtttctccttcaatcacagcagttagatttgcgctattggttgcttcatccaagatcgtatctaaaagatctttttcaagttgagtcccaatataataaacgacaccttgaccaaatcgatttttggtcactgctggtgaaccggcatagaagttactcgtatagtccgctacagattcagcggtctccaaatggatgatctcactgactaagttactttctccctgtcttcccccctttaattgaataacgttcgtctgctctggtgctaatgcatcaatctcttctacccagattcctgctagctctcttaaaggcccagggtagccgcctagatggacattgtctgactggtcaacaatgccactcatatacgttgtgatcaaggtgcctccttgttccacaaaggattcaagagcttctttcatacctgcttttaccatgtacaaaaccggtgctaccagcacttggtacttgctgaaatctgcatcaactgacaccaaatcggttgcgatattcttttcataaaagtaacgataatattgatggatttgttgcacataagtcaaatcaactgttggtccgctcgtatattccaatgcccaataattatcccaatcaaatagaacaccaacttcagcctttgtttcactacccaaaacttcgttcagtcggctcaattcttctcctaatgctgcagtttctttaaatacacgggtgttctcatgcccaacatgttctatcaccgcaccatgaaacttctcacaagcaccaatggagcggcgaagttggaaaaactggattgtatctgctccatgagcgatcgtctgatagctttgcgcgcgcatttggccaggttttttcaatgaattatatggttgccagttttgttgggatggtgtttgttccatcaacataaatggcgcttgcttcaatccccgcatcaaatcatgagtcattgcaacgaaactccatggtgtattatacgaaggatagttgtcccaagaaacaatatccatttcttttgcccatttgaagtaatcgagtcctttaaaagttcccatcaaattcgtggtaatcggtgtttgactatcgaattgacgaatagcattccgttctaacttaaagttttctaaaagactgtcagaattgaaacgacgataatcgatagaaattcctgcaaatgcggttttgtcatgaccgattccttcagaaagagcattcggcagaacgatttcgtcccattcataaacagtatgcccccaaaattccagattccacgctttattcaatgcctcaagggtttgatacttatcttttagccagacccgaaaagctttctcacagttttcgcaataacactcacctccatattcattattgatatgccaacaagtgacttgcgggttaccaacatagcgttgtgccaatttcccagctaatcgttgtgcatatttttggtagactaagctgttaggacacgcattgtgccgctgtccaaatttatggtgcctcccttcatagtcagttcgagccacttctggatagcgcttgaacatccatgctggcaacgccgctgttgaagtcgctaatacaatgtcgtagccttcttcactcaacatatcaatcatctcatccaactcattaaagtaataatcgtgctctgaaggttggatttttgcccaagaaaagacattgatagttgcactattgatgtgtgcatttctaaaaattcgcatatcttcttgccagatttcttgcggccactgattagggttataatcgccaccgaataaaaaccgttcaaaaacttttttcatgtttgacgctcctttttctcattgataattattattgtaaggcttttcaaaaagttgtagtataataggattgtcatgattctataatatttcgaaacaaggagaattcaatgtctatctatttctatcagaacaaccctcggctccctgtcagtatcgagagcattgggaatcattgggcacaagatgaagtggttcgccccactggttatccatattatcactggttgcaaactaccgctggccaagggaccgtcctttttaacgatcaatcctttgtgttaactcctggggctggcattttgattttgccattcatccctcatcgttaccatcctcatagagactggcagacaaactttgttacgctgcaaggagatttagtacaggaactgttgaaaccttttggcggaaagcgctacttgatggggcaagatagccctttattttcttacagtgagtggatcaatcaacgaatcagcgacgatcaagaaaaaatattagacccattgcgctcttccagcagttgctatcactttcttttggcattgatccaacaacaaaatgctgacgcaaatgaaaagcatcatttgtaccaacgctacattgcgcctgtactactagaaatcgaaaccaattatgctcatccattgaccgtcgctgaacttgcggaaaaaatttttgtaactccgcagtatttgtcgcgtctctttcagcgctttttggggcagtcaaccttccaatttttgctgaattatcgcctgaatcgtgccaaagaattattggtaggcgagcctcatctggatatccaagatgtcgctttcttggtaggaatcccagatgcaagtcatttcactgctcttttcaaaaaaaaagttggcgctactccaaagaagtttcgccaactttatcgttgatctttgggtttcaggatatcttgccactgtcccatttgatcaataaattttttgcttttcaaatgtaagccaacatattcatcatacaataaatcaattacctgacgaatggcttgcttcgtttctggttttaacttgatcgatgcgatttgttcataagagatttgtgcaaacaaacgaataaaatggattgcccttggatcaccgtgataacgatggtcatctaatgcccaatgcttttcgcatatgacgccattgtatttcgaggagtaatcaaagcggccttctgtttgtccgcagaccgcacagtgggtccatatcggtgagaccccaaaacgctgcagcaactgaatctcaaaaatattagtgatgatctctgcatcattatcagtatccatcaactgcaaagcttcatgtaagaaatgatagagatttggatcgtacacgcggtcatcgatcgcagagtcagccagattcaatagatacgtagcatagcctgcaagaaaaatatcaccttggattttgcgaaaagaatggatatctttggcattattcaagaatgacaagccctcagaacgaatatttccaatataggtcgcttcagtgtacgaaagcaaagctggcgttaaaggattattcttgcggtgggcaccttttacatagaacatttgctttccagccgattcagtgaatattttgaccagtttatcattttctttatggtccctagtaaataacaagatcccttttgtttcaactaaattcatgaacaacgctcctttctaaaccagaaagctgaagcagctcaatccccttcgcttgctccagctttctttgtcttttctctcatcaaacttcttagctgatcttgtttagagaagatcagtaatcatcgttccgataaccgtagtctgtcaggaaggtttgtttgtctcgccagtctttttgaactttgacccataattccaagtaaactttatcgtctaacaaatgctcgatatctaatcgtgcttttgttccgatttgtttcagcattttgccgcctttcccaataatgattcctttttggctatcccgttcaacgacgatcgttgcttgaatatgaattttatcattttcatcccgtttcatcgagtcaaccaccacagcgactgagtgaggcacttcgtctctagtcagtaacagcactttttcccgcactaattccgaaacgatgaaatattctggatggtctgtgatttgatcctcaggaaaatattggggaccttccggcatttgatcaatgactaatctcatcaatgtctcaaaattatttccttccgttgccgaaatcggcacgatctccgcaaacgtcatttgagccgcataatcttcgataatagctaaaagttcgtctggatgtactttatcgattttattgatgactagaaagaccggcgtctcgtttttccgcagccgctcgataatgaagtcatcgcccttcccccgtttttgatcggcactgatcataaataaggtcacatcgacttcacgaagtgcactataagcagtttccaccatgaaatctcctaagcgatgttttggcttatggattccaggtgtatcgataaaaacgatttgtgcatctggtgttgtgtaaaccccttggattttatttcgggtcgtttgtgctttgtcgctcatgatagcgattttttgacctactactcgattaagtaatgtggatttaccaacgttgggccggccaacaatggcagcaaagcctgatttatgtgttgtcataggtgatctcctctgtgtattatctttctaaaagaacgctaaaatttttggtataaaaataattgccgcaacgatcaatgcaaagaatgctgtcatcaggactgctcctgccgccatgtctttgatttttttgccaatgggatggaagtgaaaatcggtaaacatatcaacgacattttcaaagactgtgttgacgatttccacgatccaaaccaaaaataccgacaacaacaaccagagccattccatttgatttaatctaaagacaaatcccgcaatgattgcaacgatgcctaacaagacatgtttgcgcatattgcgctcttcgtcaaagacggtcttgattcctgtaaaggcaaattcaatggatgtgataaattgtttgtttttttctgtattcttatcttttgagtccataggcatccaatatttccttttgcagaccgaacatttctttctcatcttctggtgtcatatgatcataaccattgatatgcaaaaatccatgcagcgctaaaaagcccaattcccgatcatagctgtgtccatactcactagcttgctcttttgcccgctcgactgaaatcatgatatccccaagatttctcggcatagctggcatttcatcatcaaagatgatcggcaactcttcttccgtttcttcttccaaagcaaaactgatgacatccgtcggttgatctttatcacgatagtcccgattgatgacttggatagcggcattgtccatgaaggtgacagacatttccgtatcctcaggcagcttcaaatagtctgccgcatactgcagcagttcatcaatttcattgattttctcttgactcactgtatttgtttcatctaaaaaagcaatctccattaccgatctcttctttcttgttcttctttcattttttccgcttcggacttcattttcggatatttgatccgtgaatggaatgtactacacaatccattgactaaggacttttcaatgatacgaatttcatgcaatgtcagtccggactcatctaattgtccatcaagaatccgatcattgatcaaattcgaaacaaattccttgattttctgatctgtgggattatccattgcccgcacagcagcttcacaactatccgcgatactaacgacccctgcttctcttgtttgtggttttggtccaggatagcgaaaatcggcttctgtcacttctggattacgttctttcgctttgacatagaaataacgcatcaaggttgttccatggtgctggcgacaaatatccaccaccatctgaggcattttctcattttctaaaagaaccgctccatcgatcacatgtccgaaaatgatctgcttgctgtcttccggaagcaaaaagttatggggattttcagcccctgcgggtaaattctcaacaaagaaattcgcatgctttaatttaccaatatcatgatagtaacaagcgacccgtgtcagtaaactttgtccgccgatctctgctacagcattagcactcaaattggcgaccatcatactatgatgataggttcctggtgcttcttccagtaattgtttaagtaacgggtgatttggattacttagttcgttcagaacgatcatgctattgtctgagaccaataactcaatgtattgatgcaaaccaatcgttagtagatagctaagtaatgaacccgctaaggcacaaatgatcgtcgtccaggtattgcctctcgcgaaatccatcccttggaaaatcactaacatgacacttaataagaacggaaagacgatgacccacataatggctgttcgtccttgactggcgattcgttcccttctgatcatcgttcccatcaatccagagaacaaataggttaccaagacagtagtcagcatattcgtaccgctggaatcaaaataaatgaaaatcgcattgattacttgaaacatcgcagctaaaattcccaaacgccgacttgagaatatattcaagatcagcggggtaaaggcagctggaaagaataacggaatgaacgcgatgagttcagactgaaatagttggaaaaacttcatcaataaaatactaaaaatcatcgcaatgacataaaaggtcacagcattcatccgtttgtcttcgttttttgtctgccgtgtgtaataaaagagcatgagcatctgtaaagcagcagtaaaaactaaagcaatcaacggaaatacagagaaggtttgactcgtcagaccgagaagctgcaatttttctaatgcatttgaatcaatctgcgagccttcccggacaatgatctcaccttgatagatcataacaggctgaacagcgtctttggcagcctgccgagcttcttccgttcgtttctcattaggaaaatcgttgacaacgatcccttgattgactaaaaagcgtaatgctgttgccatttcagaagttacatccaaaaactggatcttttcttcggcttctgatcgaaaagtactcaattcagattggcggatctgtttagccatttgttcatcaacaagctgcagcgcataatctcttaccgtgttcagctgatcactattcaatgaaaacaatgtcgacaaaaaattattggtcagcgcttgataaaaatcaagttcatcatcactcattttttcaaattctttttttaaagtggcgatatactcttctgtatccggtttaggaacattttcattttcaccagcagctttgaccgcagcttcatatttcgtattgacagtcttgttgactgtatcaatcaattcaaacaaatgattgatccgttcatgttgaacttgtgccaaatcgtcttgatacgtgtattcaggcgagacggcttcagcggctagcgtacgtttttgttcagtagcagttgtgttttcaatcgttttgttggctcggatattttcttccgcaacctgcccctcgctatagtcgacattgttttgttttacactggaaaacatgatcccaatagataaaacaaaaaagagcaccataagcagcggcaggtaaaagcggcctaatttttctcgaaaattccgtaacggttgtatgatcattttacccctcctgtccgacaatcaacgttgttctttactatcggattcctcataggcacgtataatgtctgcaacgactggatgacgaacgacatctcctgcttcaaagtgcgcaaacgcaattttaggaattgcttctaacgctcgttgcgcatgaatcagtccgctcgttgttccttttggtaaatcaatttgacttgtatcgccattaacgatcatttttgaattaaatcctaggcgggtcaaaaacattttcatttgggcaatagtggtattctgtgcctcatcaagaatcacaaaagcatcttccaaagtccgccccctcatataggctagcggagcaatctcgatcacgccgcgttccatcaaacgattggtatgatccataccaaagatttgataaagggcatcataaacgggacgcaaatagggatcgactttttctttcagatcacctggtaaaaagccaagattttcacctgcttcaacagcgggtcgcgtcaagatgattttttgaacttgtcctttcttcaatgccgcaatggccatgacaacggcaagaaacgtctttccggttcctgctggtccaacgccaaaaacgacatcatgggttctgatggcttcaatatatttcttttgtccggcattttttgcgcggatcggcttaccgttacgatctttgatgatttcttcttcatacatatctgtgaaataatctaagtttcctttatttgccatgttcaatgccgtaataacatctggcgtactgatattgatccctcgtttgatcaactcttgcaacgcatggatcacggattgggctttttcagcggctgtcttttcaccaatgatttggatcatttctccgcgggtatgaatcgttgtttgtgtagcatcttcgatgactttgatatgtttgtcatgggaacccaacaacaaactaatatcatcattttgagtcagttggatttccaaagaaatacgctcttctgtcaaataagttacagctccttttttaggcattctagtttataataccacacaatcgctaaaagcaaaattacttgtaagcttcaagaagcgttttggcagcgttctttgcaatttattaaaagtttgtttttcgatcattgattctacttaaaaatactcactaagaaagaacaaaaaagccgtaagcatccaataagatgcttacggcgtgtccttacatttgccctaataattctttgacgatcgcattgacttggttgccgtctgctttgccttttacttgaggcatcacagcgcccatcacttttccgaattccttcggagaagaagctcctgttttttcgatcgcaccagcaacgatttggcgaatttccgcttcatcaagttgtgccggcaagtatttttcaacaattgcaatttcacctttgactttttcagccagatcggtacggtcggctttctcaaattcagtcagagaatcacgacgttgtttcatttcacgagacaacacagtcaattcttcctcttcgttcaagtcggcaccttttttgatctgttcgttttgaatcgatgctttcaacatgcgaatcacctgcaacgtttccttgtctttggctttcatcgctgttttcatgtcatcattcagtgtacttagtagcgtcacactaccagctccaattctcaaaacagtagaaaattagaattttttacgttttctagctgcttcagattttttcttacgctttacacttggtttttcgtaaaattcacgtttacgagattcctgtaaagtacccgcttttgacacggaacgtttgaagcgacgaagagcatcgtcaagtgattcgtttttgcgaacgactgtttttgacatgtaaattccctccctccgagcttaaaaagtaaccgtatttgtcattgaaataaaatctcaaaaaacaagactgtcctttgaaaattatagctaacccctgaaaaagtgtcaaggtattctagtaaaaaagtcgatgaacttcctgattcaatcttagaatccgaacaatcagcgacaatcttcacatctgcctagaatttcaaaacgatggccttcgatactgcacccgggcaattgttcttgaaagaaatccattggacaaatatgcagctcttttgttttgccacaaaccgtgcaaataaaatgatgatggtgatgatcttccaattccacgcagcaattataacgaaatttcatttctccattcaattcagtctcttccaagatgccaatctcagaaaaatcatgaaggttccgatagatcgtgtcataacttagacccgggtattcttcagacatgaaatcatggatttcttttgccggcaaataacggttgcgtttcactaaataagtaatgatagcttctctttttttggtatatttatagccatgttcttttaatatcgacatagcttgctcaatcaatggttgatttttcatcgaatccctccagtaaatcaaaatcattccgatttttagcgatcgtaagtatggtataatgaaattatcaaaaatgcaagagaggattttactatgaacccacaagaaacgattgtcacgatttttgtcttgtccgattcagcaggagaaacggcctccaaattagctcaagcaaccatggcacagtacccaagtgttgaattcaacttatttcggcgtacctttattcacaccaaagaacacttgatccaggcgttgactgatgccaaaaaacacgatgccattattttgcacacactgattaacgatgagctagtctcgctaaccaatcacttttgtgaagaagccgacctgtatcattttgatgtattgactcctcctgtcaccgaggtagaaaaacgcacaggtgtcgctccgtcgcgagaacccggcgcattgcatcatttaaacaaaaattatttcaaacgtatcaaagcaatggaattcgctgttaaatacgatgatggaaaagacccacgaggttttctcgaagccgatgtcgttttgttaggtgtttcccgaacatcaaaaacaccgctaagtcttttcttagccaacaaaaacttgaaggtggcgaatttgcctcttgtgccccaagcacatattcctaagcagttgtgggaaatcgaaccgagcaaaatcgttgggttaacgaatgatcccgacgttttaaacagcatacgcaaagaacggatgcgttcttacggattgaatccagacacggcgtattcagatattgaaaaaatccgggctgaattagagtttgccaatgatctttatcaaaaattaggctgcatcgtcattaatgttgcctctctttcaattgaagagacagcttccatgattttgaatgcattgaatttggaagaccatagttactacacgtcagaaacagaagaataaccagccacatacattttagacaaaaagatccccagagtaatggtcagctagactgtaccattattctggggatttttgcttgtgtcaaatcagaaaagtctaaaagacttggacgccttcgcgatcgatctgcagctgttcgattgctgcattggtttcaagcgcatggagaaggcggcagatcttatctgccttttcgggtgggacaatcgctaagacagttggtccagccccactcaggaagcagccatagccgccttcttcttcacaaatttggcggatcgtggataaatgcggaattaatttttcacgatagttctcatgaaaacgatccgcctgcatcattttacctgctaaaggtagattccctttgatcactgctgcgatcatcacattggcgattgcactggcttcaacagcagttgaaaagtccagtgttttagggaggacattccgactagcttctgtcaacaattgttcttgcggaatataagcaacaatattgcattccggaaaatgatgtttaacaacataagtttgtttatgttcatgatcaaaggccgtaatcagaaaatcgccataaattgccggtgccacattgtcggggtggccttcaatggccgttgcaatatcaactttctgtgcatcacttaagttcaggtgtcctaaacgattggctaattcgattccagccacgataaccgatgaactgctgcctaatccccgtgctaaaggtatatctgagtacatgcggattttacgcggtgtaagtgtaggtgcaagcttcagcgcgacacgtaacagcagattactttcatcattagggatttcactgccgagttcatgtaagatctcccatcggtcactttcttccataatttcaatgaatagatattttgagagagcaatcccgcaagaatcaaaaccaggtcctaaatttgcactggttgcaggaacgcgaatcttcatagttgagacactcctttacgcaggtgttgccgcatttcttctagatcactcatcttatggatcgctacttcggtagcctgaatagctgtatcaggatctttcaagccgtttccagtaaagactgccactacggtttcaccaggacgaattttcccgtttttcacgtgctgaatcacgcctgctagtgaagcagccgatcctggttcaataaagacaccgtcttgtgcagctacctttcggtaagcattcaagatctcttcgtcggttacagcatcgataaacccttttgattcatcacgagcggcttctgctagcttccaacttgctggattgccgatccgaatcgctgttgcgattgtttctggctcttcgattaccgcgccttttacgattgctgcggcaccttctgcctcaaatccatgcattcttggtagtgaagtcccttgtttgtcatgccattctttgaatcctttccaataagcagagatgtttccagcatttcctactggaattgctagtacatctggcgctttctccaactgctggcaaatttcgaaggcagcggttttttgtccttccaaacgataaggattgactgaattcacgagggccacagcttctgttttggcaatttctctaactgcttttagtgcttcatcgaaattcccgggaatagaaataatatccgcgccataaacgattgcctgtgccaacttgcccattgcgatcttaccatctggaatcaccacataggctttgattcctgctcgtgtcgcatacgctgctgctgcagcactggtattaccagtagaagcacaaacgattgcttttgcgccttcttccaccgctttggctactgccatcaccattccccgatctttgaaagatccagtaggatttagtccttcgtatttcccatataatgtgatacccaattcttttgataagttattcaatggaatcagcggtgtgtttccttctgctaatgagattagcggtgttttttctgtcaccggtaaatactctttatagtgctttaatagtccttcatacatctgctactcctccattactttcatgatttggctaattcgaccatcttcaaaaatcgataatgctgctgttaattccgagggactcaatggcttcgtcaaaaatgctttcttttccaagatagattcttggtcgatccagtccaatgtctgttgctgcgctgctaatggtccagtcaacgcaatgtaataacgttgacgaagctcatctggtactgcaatctgagtcggctgttcaaaggttagaaatgattcagtgatcccagcagatttatttttagcgatctccgtcacatctgccagcacactcgtcgcagtaggacgagcccccgctccaggcccgtaaagcatggaacgatcgatgcccgtactttcgatatacacgccattaaactcatatttgattgaggctagcggatggggcttagggacaagaactggaccaacagaaacagcgacatgattttttggtgtcttttgtgccgtaccaataagtttcacttcataccctagttgttgggcataaatgatgtcttcaattgctaatccacgaatgccgccgatagaaacatctttcatctcgatcgtcataccaaatgcaaattttgtcaagaggaccatcttataagctgcatcaataccgtccacatcattggtcgggtccgattctgcaaatccttttgcctgtgcttcagctagaacttcctcataacttaagttatctgttaacatttttgtcagcatataattcgtcgtaccattgacgatgccagaaatcgaggtaatcgtatcgggtaaataatgcgtgcttaatgttcgcaagataggaatcccgcctcccacgctggcttcataatacaatgcaacaccggcttttttagcagcggcagtcagttctgggccatgagacgccaagagatctttattggcggttacaacatgtttcttgtgagctaacgcaccaagaataaaatccttcgcaggatcgatcttgccaatcaattccacaatgacatcgatggactcatcctgatagatttcctgaatatcactagtcagttcaaacccgtatttttgggcaattgcgcttttatcatcataaggagaggccaatgctttcgtaataaaaatctcgacaccagttcgggctgcgattgcctctctttgttccgctaatagttggcagactccagtgcctacgacacccattcctagtagtcctatatttaattgctctttcatatagcctccttaccgaaaacgttattaaaaaatcgttcatccatttttaattttctactagcataccaaaaagcataagaaaaaactagggctttcgagaaattctcgtcctagtttcagcggtgatggatatgagcgaatgttttttgtaagatgtcgactacgtgcttgtcatctaaactatataaaattgtctttccttgtcgttccgattttacgatccgattatctttcaatagtttcaattgatgagagaccgcagattgttccatcatcacttgctctgcgatcgaagttacattacgttctccttcttctaaagaaagcaatatcttcaaacgtgtaggatcaccaagcattttaaaaatttgagtgactttttggatatcttcttgatctggttgagtcatgctggtcttcctttcttgatggtgaataaaattctagctggttcaagcattctttgtcaagccccattgaaaacaaggcgtcaaaataaatgcaggatccacccaaatacctggaaaagaagcagcacattttcctataataagttctccaagaagaactgaatatcagcaaaataatctatctgattctcatccaagtatttgaaaaggatctagctcttgtttatcgcttaaacttctgtaatttcattaatggcagcttcaagttcagcaattttatttgctgcatcttcagaagagtttcctttgacaccaatgtaaaatttgatttttggttcagttccagaaggacgaaccgcaatccagctctcatcttcaagagtatatttcaatacatctgacggtggtgtagtcattttttgcatgtgaccatctaaaccaactcttgtcaattctttgaaatcttctgtttgaacgactggtatacccacgaaaactgatggtgctttttctcggaatgttttcatcaatgcagtgattttggctgcaccttccataccgctcatcgtaacagaaatcgttttttcggcataataaccatattcctcaaagatatcttgcaatccatcataaagtgttttgtccgattgtttataaaaagcagcgacttcagccaacaagacaagtgcttggatcgcatctttatctctcacaaaaggttttaccaagtaaccgtaactttcttcaaaaccaaacatgaacgtatgggaatgatctgtttcatactgttggattttttcggcaatgaatttgaagccagtcaatacattgaccatttcaacgtcgtaagactgggcaatcgctgttggcaattcactagaaacgatcgattttaggactgctgcattttccggtagtgtgccggcattcttgtgggcttctagaatgtaacggatcatcaatgcgcctaattgatttcctgtcaatacttgatagtttccatcaggcatccggactgcagcacccaagcgatccgcatccggatcagttgcaatcaacaagtctgcgtcttctttttctcccagagcaatcgcatattcaaaggcagaatgttcttctggatttggtgacttgactgtactgaagtttggatccgcaacagcttgtgaaggttcaataataaattgctcaaaccctgcttgtttcaaagctttttcaccaagcatccgacctgttccgtgtaatggtgtgtaaactaatttaagatttttccctgttgtctcgattaatttttgatcgattgtcactgttttgacttcttttagatacgcagtatcgacctcttcgccgataatcgtgatcaatccactatgctttgcttcttcttctgataaaactggaatttctaatggattttcaatttctcgaacaaaagctgtcaaggcgtccgcatctgctggaggcatttgtccaccatcttcgccgtatactttgtatccattataagctgccggattgtgagatgctgtaatcatgattccagtgaacgtatgcagataacgtaccgcaaaagataattcaggggttggacgtaagctttcaaacacaaaggcaggaatatcgtgttttgctaatgtcttggctgcttccatcgcaaattctggtgaaaaatgacgagaatcatatgcgattgcgacaccgcggcgacgggtttctggatcttgtgtatccatgaagcgcgccaatccctctgttgcttgacggaccgtatagatattcatgcggttgatcccaggtcctaagatccctcgcatcccagcagtaccaaattcaagcggcatataaaaagcatcttgcaacatttctggatctttctccagttctgttaactgatccttcaaccctgcttctaattgttgatgatttttccattgctcataaatttgttcccatcccatacaaaaaccactccttctaactttaaaatgactataattttagtataacactacttctgtttttctcaaagaataaccaaacgaaaatgcaaacgcactgctatcaaaaacgaataacgttttataaataacagtgcgttcgataattatttaactggttgctggtctttttgtgtttctataaaatcaaatacttgttggccagcgatactgccgtccccgactgctgtagtgatttgtcgtaagcctttttctcgaacatcccctaccgcatagacgcctggcatagttgtttccatcatttcattggttgggatccaacctgtttcattcgtgagtccactagctctgaatggttcagtcaatggatctagcccaacgtagataaagacaccaccagccgcttcttccgttacttcatttgttttgacatttcgcacttgaacaccagttacgaccatctcgttgcctttgatttcttccacgacagaatcccaaataaatgagatcttttcattggcaaatgctcgttcttggatgatcttttgcgcacgtagctcatcccgacggtggacaatcgttacttctgaagcaaattgtgttaagtagatcgcttcttcgactgcagaatctccaccaccaactacgatcaaccgtttgttgcggaaaaaggcgccatcacaaactgcacaatatgaaactccgcgtccagcgaattcttcctcgcctttgactcctaattttctatgtacacagcctgttgcaatgatcacagttttcccttgataattcttgtcttctgtgcagacttccttgtactctccatgatccgtgatcccttgaacgatgccataggcattctccacgccaaagcggatggcactttcatacattttaaaagcaagttctgggcctaagatcgaatcgaagccaggataattttcaacctcagcagtattattcatttgaccgccaggagctccccgctcaatcatcagaacagataaatttgaccgtgacgcatacagcgctgctgtcatgccggcaggtccagcgccgataataattacatcatacataattgttccctccattttcgactacccatactttactttcaaaaagaatttctgtcgaatgttctgcttacaaaaaataataagatattcccgtttttttctctgaaaattacattgactttcttttcattttttgtaaaattttcacgatacatctattatatagaaaacggggagtccttacaattgaataagaaaaaacttttgaaaagatctgatcgggaactattgtttcttagctggccgatttttgttgaactatttttacgtgtgattattgggaatgtcaatgtatggatgatttcccattattctgaaccagcagtcgctgccgtcagcgcagcaaatcaattgctgaatctgaccgtctttatttatggtttcatcactgttggtacgcaaatcattattgctcaactaattggtgcgaagcagcgagataaaatccctactgtgatcaatacagcactttttggttctctattcttaggtattttgatcagcttgatgtttatctttggctctgatcaattgctgcattttatgggattagaagaagcattggttgatttgggtcgcggctacctgcaagtatatggcggaagcttgtttatttcttcgctgacagctgtcattatcgcggtcatgcgtagccacagctttacgaaacctgctttgcttgtaccgatgtttgccagtatcttagctgttattggtaactactttgtactttacagtccttttggcttacctaatttcggtgtaacaggactagctttctccagtgtcttcggcaatacgattggcttgattgttgcggcatttttactgaaaaaacacgttggtttttctgttctttctgcccgattgaagtatttatcatgggatgtaatgaaaaatgtcttaacctatggcctaccttcctcaggagaatctttgtcttatcaaggagcacaagtggtagtaacgatgatcgttgcgcaattaggttcaagcgtgctgattgctaagtcttatgttacagcgatcactcaatttgtgtatttgatcgcctcggcgttaagtcagggaaatcaaatcatgattggtcgtcatgtaggcgcaggagaatttgagcgagcacaaaaacggggcatgcgcacaatgatcattggcatcatcgcttctgttacaatttgtttattgacttatctctttatcgaaccgattatgggaatctttactaccaatactgaagtcatctcaatcgctaaaggcgtatttctcgttgaaatcgtcctagagacagcacgtgcggtcaatatgattctagtgggctctttaaatgccagcggggatgttaaattcccattattctgcagtttgatcgttctttgggtcatcagcttaccattctcgtactctttggccatcgtctttaaatttggcttgattggtgtctggatcgcttacgcaattgatgaagcattgcggagtattttaatgatttatcgttggtattccggtgtgtggaaaaccaaatcggtagtccatggaaaagaaattgaaggcgaagtcgcttcagaaatctaatgacttgctaaaaaggtcatcttttctgccaattagacaatcgaatgtcaaagcgaataaaagagcgtgaaacaaaagtaaaaaatacttttgtttcacgctctaaacacgtctaaacagcggtagccgaaacaatgtcttcggaaataagtcgaaataccaaaaaattgaaaagcaatttccatatattcctccttatttatcgaagtttaacacttctgatcccaacctttttttgctgccttgtgtctatttactgctgaaagaaaatcaattatttttggtttttcctccagattgaaatatactaattacaagtttagaactactgaacaatcaacaattagaaaatactgtcaactatcgaaaggagcaaaaaaatgtcaatttacgcgtttcaagccactttggaaaacggtgaaacctattcattagaacgctatcgggggcaagccatcattgtcgtcaacacggcgacaaaatgcggattgagcccccaattcaacgaacttgaagaattgttccaacgatatcgcgaccaaggattgatggtcttaggcttcccttccaaccaattcaaacaagaagttcattctgctagtgaagctgccgaagcttgtcgcacaacctatggtgttgactttccgatgcatcaattgacagtcatcaacggaaaagaagctgatccgctttttcaatacttggaggaagaagccccaggaacgatggggaaagcgatcaaatggaattttactaaatttttaattgatcgcaagggacatgtcgttgaacgttttgcccctcagaccaatccaaccaaaatgatccctagtattgaaaaggttcttggctaatgatctaaccagaaaaaacatccactcactcatcggtttgcaacagcaatgaatactctctcactgctgtttgcgccatgaatgcggggatgttttcttattctttaaagttgttctccatttgaagcaatcacttctttgtaccaatcaaatgattttttctttttccgggccaatgttccgttcccgtgatcatccatgtccacataaataaagccatagcgttttttcatctcaccagttcctgccgatacaagatcgatacatccccaaggtgtatagccaatcaagtctacgccatcaagagttatcgcatctttcatggctgcaatgtgttttttgaaataatcaattcgataatcgtcattgatcgagccgtcagattccactttgtctatggcaccgaatccattctctactacaaataaaggaagatgataacaatcagacaattgacacaatgagatccgcaaccctaatggatcgaccgcccagccccaatccgattcggctaaataaggatttttcaccgcaggcatttggttgccgccaacatacttgactgtttcaggatttgctgaagaagcggttgacatataatagctaaaaccgatatagtcaaccgttccgttcgcaatgaccgcgtcatctccagcttcttttttgatttcgatcccttcacgttcgaactcttttaccttgtgggcaggataatagccttttgcttgaacgtcaatatagaattcttgttcccgattgaattgcaatgcagctaaaacatcctctggattagctgtcatcggataacttggaatatacgccaccatcatcccaatcatgaaatccgggttgattcggtgtcccatttgtactgctttagcacttgctacaaacaagtgatgagcagcttgatacttatgctgcttatcatttttatgaataccaatttgtgtccaacttctcaaaaagttgatctcgttaaacgtcatccaatatttcactttatcttggtaacgagtgaagatcgtttcgcagaaaaacaagaaatagtcgatcactttgcgattcgaccaaccatcatattcatccgctaaacacataggaatatcaaagtgattgatcgtcaccactggctcaatgccatgcttcaacagctcatcgaaaactgcatcataaaaagccaggccgtcttcgttgatctctctggttccttttggacaaatccgcgcccaggaaatagacatccgaaaacacttaaagcccatctctgcaaacaacgcaatatcttcctgataatgatggtaaaagtctgtcgccacatgactaggataatactgctctggatcgatgtacccaacggcaccttcaggtaattcggtatcccgagtaactttcccgatctggccgtcttttgttttataggtaatcattcgcggctgatccatactgcctcctgtaatggcatcgagggtgcttaacccttttccgccagaaagatagccgccttcatattggttcgcagctgttgcgccaccccaaagaaaattttttggaaaccccatattatccctccatcgtaaagactatcagcggctttcttcttagaattcatccaagaagaagccgcaagcatgattatttgtttgttaagtcttcgccatttgaagcaatgacttgtttgtaccagtcgaaggattttttctttgtccgtttcagcgtaccattgccttcattgtcgcgatcaacatagataaaaccgtagcgttttttcatctcacctgttcccgcagagaccaaatcgatacatccccatgttgtataccctaatagatcaacaccatcttgttcaacggcgtctttcatggcttgtatatgtgctgcaagataatcaattcggtaatcatcctccacatagccatcagcatctggtgtatcaacagcacccaaaccgttctctacaatgaataatggtttttggtaacgatcataaaggtcattcatagtaatccgcaaacctaatgggtcgatctgccagccccattcgcttgcttccaaataaggattttttactgaagcaaaaatatttccagaagtttgttccaatagctcagcatctgttgtcgatacccgagaagagtagtaagagaatgaaataaaatcaactgtgtgggccttcaataactctaagtcgccttcttccattttgatctcaatcccgttacgggccatttccttcaatgcatattgtgggtattctccccgagactggacatcaatgaagaaatagttttcgcgatctgattttcttgatgcccaaacatcttcaggcttacttgtgtaagggtagtaggcacctgcagccagcatacagcccactttattttccggatctacttcgtgagcgattttcgtcgcaatcgcagatgccaataattcatgatgggccgcttggtatttgacctgctccacgttgtcgccttcttcaaaatagaggccagctcccataaatggcgcgtgaagaatcatgttgatttcgttgaaagttaaccaatatttgaccaatcctttgtaacgattaaaaataactcggcataaattctcataaaagcctactaattctcgtgaacgccaagcaccatatttttctactaaatgcattggacaatcaaagtgcgtgatcgttaccagtggttcaataccatatttatggcactcattgaagagatcctcatagaatttcaagccgtcttcatttggtttttgttcgtccccttttggaaaaatacgactccaagcaatggacaaacgataggttttaaagcccatttctccaaataaagcaatatcttctttgtaacgatgatacatatcgattgcttctttggcaggataaaaatgatcctcatcaaaatcaaacattttcatctgtcctgtgatgactggaaaacgatctttaccgatcggtacaacatcgacattggctaagcctcgcccaccttcgttgtaacctccttcacactgattggcagcagttgcgccgccccataaaaagtcttttctaaatcccattatttcattcctactttcttgatattttgttgattaattaagtgattttgccagttcgtcttgaacttcgattccttctttttccaaacgctcaatcgttgatttaaagtttggtagataagctttgtgagcaataaataattcatccattacgcgtttagctgtttctcctgatggcaccaatgggttaatggtgaaagcttgtaatgcggtattgtaatcgccagtaaccgctgcttcgatcgttaaaagctccatagccttcattacttgtagccagcctttttctgcagtcggcagctcgccaaaagccacattgcgggcaccttgtcccccaacatacgcggtaacttcgacaacacaatcagccggtaggtcaggaacagctccctcatttttggttgagaccacgatctgggtatttttgtttgcataaatcgaggcaatcgtttcgcaagccgcatctgaatagtaggctcccccacgttgctgcagctgttctggtttatgatccaattctggatctttataaagttcaaaaagttctgcctctgtttgcttcacttgctgcgctctcgttcctacagtctgatattcttccagtgcatgcttcaacatttcttcttgacgatagtaatagcgatgataaccgcaaggaatcattctcatttgttctaattgttcacgataaaacggcacatcaaaaatatttttcggcaaaccattatcttcctgatacattttatcaataatatccatcgtcacatcatttccgtgtgagtcagtgactttatgccaatggaaatggtttaagccagcaaatttgtagattaactcatccggctctttaccgatcaatgcaggttcgatcatggtcgccatcacaggaacattgcaaagtccaatcactctatcccatttcccataacggacaaccgcttctgtgaccatgccgcttggattggcaaaattaatcaaccaagcatttggacataagcgtttcatatcttctacgatttccagaataattggtactgtccgaaatgctttaaacatcccgccaggaccgttggtttcttgaccgatcatgccataataggcaggaatacgctcatctttgatccgggcattcagcaagcctactcgaaattgagtcgtaacaaaatctgcatctttcaaggcttcttctcgatccagcgtcatgtggattttcacatcataaggagaagcatcccacattcgctgtgccatcgctccaacgattgccagtttttcttttcctgcttcgatatctactaaccaaatttcccgaattggcagttcttcatagcgtttgataaagccttccattaactccggagtataactactgccgccaccaatggtagcgattttgattccttttgtcattgtattgctcctttgctattttatttacacccttattatcatttataaaataattcgattcaatgtaaatttattatttagaaaaagcgtttgcaaatctagggatatcttgcgagtgatttgtaaaaagcatttacaaatcgaatgatataaggaataatatttatatcgacaattattcaaatactcaaaaaagaaaaatttccgataattttatttacaaacaactatataaaaatgtaaaaaggaatgtggataccatgttattacaagaaaaaatgcgccaaatcaagttggcccctgctgaacgatctttgatcgattttttattagccaatccaactgcgatggctgatcaaaccatcaaggaattgtctgaaaaaacctacgttcatccttctacttttattcggatcgccaaaaaattaggcttcaacggttggctcgacttaaagacagcctttttggaagagcaaacctatatgagcagtcattttacagatgttgatgccaactttcccttttcctcccatgacggcattatgacgatcgccaaaaagttagcgaaactcgaacaaacaacaattgaagatacgctttccttgatccatcacgatgaactgcaaaaagcgaaacaatcgctactcaatgccagccatatcaagattttcgcaagtaatgccaataccttgatttctcaagactttgttttgaagatgcggcgtttaggaaaaaacatccatgtttgtgacacttttggcgaaagtgcttatgaagcatccaactgtacttctgatacgacagccatcttgatttcttatactggtgaaaacaagatgatcaaagaaatcggtaaaattcttgccgaacgtcaagtttcaattattggaatgactagtattggcgagaacgcattggcaaaattaagtgattgtgtcttaaatatcacaacccgagaaaggctttactcaaagatcgcaaatttcacaattaatacgtccgtttgctacctactggatgtgctgtatggaatcgtcttttcggaacattatgaaaaaaatcttcagcatttgatcgatattggcatggcttatgacaaacgtcctacttcctcaacgattatcgctgaaccaacctacgataaaaatcttcaatacaaagactctctgtttccgaattaaacggctgacaaaaagcgatcgccccacatggccgatcgcttttatgcatatatagctctttttagaaagtttttgctaaacgagagctgtaatcaaatcatctgaacaagcaacttcatttttatctgattcaataatatctaagtaatcagcagaatttgttaccaaaacaggggtctcaatgttgaaaccagctttgatcagcgcatctttgtcaaaggtaatcaatttttgacctcgagttactctatctccttgcttgacatgcgcttcgaagtattgcccattgagttgaacggtatctaaaccgatatggatcaacaattccaatccgttatctgagatcaacccgatggcgtgtttcgttgggaacaatgtcataacggtaccatcaaatggagcaacgacttccccttttgtaggatggatcaagattcctttacctaagatcccttgggcaaaagcttcatctttggcactgcttaaaggtgcaaccgttccttcgataggagaactaatgatttctttacgtacagacattgtaggttcgccttcagcaatttcttcgactactgtattgtctttccagaatgccatcgtcaaaccaaaaccaatcgctgcagagatggcgatagcaatcagtgaagtccacatgccactcgcatctccatccggtgtgatgaagttaaagatcccgaaaataccaagtccgcccatcgtgtagcccgttacaccattgaccattaagaacagtccaccgacagcaccaccgatcatagaatatatgaaaggagtctttttaggaagagtgatcccataaatagctggttcagttacaccaaagataccagaaatgatcgctggcggacataatgctttcatctttttgtctcttaatttgaaatacatggcaacgacaactgctgtttgagcaaagctagctccgaaggaacctgtcaacacttggctgaatccttgttgcgtaacttgcatgatcgctagtggcacaaccgaccagtgtaagccgaagataaccaatacttgccagaagaatcctagaatcaatccataaaccgctggcgagaagtccattagcgcttggaatccggcactcaagagatctgtcaacatgctgatgattggaccaatgatcaagaacccaacaggtaaagcaatcagtaagacgaaaaatggtaccaagaaagtttgcacgacacttggaatcacttttttagcaagtttttgaatctgtgcagcaaatgcaataatgaaaatgactggtacgacactacttgtataggttgcccctacccatggaatacctaagaaagtttgataggcagattgtccaagtaagctataaggtgctgctgctccttctccggcaactgcggtaaaggctgtttgcagcgcagtgccttgaatcgttgggtagcatagagcggctccaataacgataccgaccatcggattcaaacggaatttttttgcagaagtataacctaaaataaccggcataaacataaatattgcatcaccgatcgcattcaacattacatatgtgcctgattctgctgtatagttgaaccaaccctgtgtacccaaaaagactaataatgcattaaaccctttgatcataccggcagctgctaacgcacctaagaaaggctggaaacaaccgctgaggatatcgatcagacgattgaaaatattccctccggaactttcttcttcactgttttcactgatccccgcaacatccactacttctgcatagacatctggcacatgattaccgataactacttggtattgaccgccacttttcatcactgttacgaccccatccatatttttcaagatgtcatcgttcgcgattccttcgtctttcaatttaaaccgcagccgagtgatacagtgggtcaaactattgatattttcttttccgcccacatttgccacgattttttctgctaattcatgatattttcccatttttgtttcctccaatttttgtttgattgaaggtttagccaactgaatgtcactatccaaaaaatgctttactattccccagtttattctgggatgacctcctttcttttatggttagcgattcttttgcaccaatcgcgcaatatgaatcgttaaatacaaactttcatcattggacatatcgtaacgataattcgttaccagaaatgatttgattttttgcacacattgataggcgttgcgatattttatctttaccatctcaaggagctgatcgtcagtctcttccgcatgggtagagtggttctgcatgcgggaaacaaaaaaacgcaaatgcgtagtaaaacgataaaaataaaccgattcttcatcgaaagttgttttaaaatagtatttgacgatattgatgatatcttgcattgttttcgtcaattcataaagattgctttgatcattgttttctgtttgagcgtttaccaaatgcagtgcaatgaaacccgcttcatcttccggcaactcaatcccatagcgctcactaattttttcaatcgttcgttttccgattttgaattcatctggaaaaaatcgcttgatgtcccagagaagaacatttttgacaacgatcccttttttggcacgctcgattgcactatgtaaatgatcaggtaaagaaatatagatcgaatcgttgatcggtgaggacaactcttctcttgcatattcgattacttggttcgaaagttccaaatattctaatggcaagtcggccaataattcctgaaattgggaagcaattgtacgattttctaaacgatatactttatcgatcgtttgatcactgatatcgtcaccaacttttttcttgaatgcgatccctcttcccatcacaataatttcgttttgtttttcatcagtagttatcacgacattattgtttaacactttactgattttcatgttttacccccacttgattattgacgtactaacctatttttatacgagatagccattcaaatcaattttgatccatactccttttttccagaaaaaaaacctaatgagagcagaccaaatagccttactttcatcaggtttagcttgttttttcaacaatcactatccatacgaatgattaacttatccttatgatagcaaacagagaaaacgctgtcaatacattgaccgaaaaaaggattcgttattttacttcctcctgattccttttataaaatgaatcgatgaaaaacaagaaccccacatacccgctcccaagccaacaccaacaaagtgatggagtgatggatacatggaattctagtaattagttagtgtccactggaaggaaacagcaaaaaatattcccgactaatcacacgtcactggactgtaatttatacatatctgcataaaggccttgctgttttaacaatgaatcatggtttcctcgttcgacgatacgtcctttatctaaaactaaaatcaattcagcatcccgaatcgtggataatcggtgggcgatggcaatcgtagttctcccttgtcgcatattcgccaacccttcctggatcaatccttctgtttcggtgtcgatattggcagtagcttcatctaaaacgaggattttaggatcagtcaccatcgttctagcaaatgagatcaactgtcgttgcccgctggagtagctagcgccccgttcaatcactttggcatgataagtgccctccagtttttcgataaatttatctgcttgcacaaatttcgctgctgctcggatttgttcttcgctgatttctgggttcaataaacgaatattgtcagaaatatctccatagaacatgaaagcatcttgtaaaaccaatccgactttttttcgtaattcttcgatcgtaaaatcgcgaatatcatgatcgtcaatcaaaatttgtccctcaccaaattcgtaaaagcgcattaaaacattaatgatcgagcttttgccgctaccagtgtgtcccaccaaagcgacggtttctcctggataagcagtaaaggaaatattcttcaatacatgattttctccatcataagaaaaactgacattacgaaattcaatctttccttgttcaatgacttgattcgcatccggatgttgttgtggggtaaattcttcattatccatgattttaagaatacggctaccagccaccatgccatcagtaaagacgctgagaaaatccatcatctgtgtcataggattgaagaagccttggacataggtggtaaaagcataaatcaaccccacttcaatcggagaatgcaaagcatcaaacccaaacaacgttaatgacatcgcaactgcaatcgcatagagaaaattgatgatcggcgataatagcaacgaattagtacgaatcattgcataccttgtcttgaggtattcatcattcgtttcctcaaattctcggttcagacgtgcttcttgtcggaactgctggataatctgcattcccgagatcgactcgttcaatttcgtattcaattgacttaatttttctcgcatttgacgatagattcgggagctgaatttttgataataccagatgacgatcatcaagataggtaagaaaatcagattcaataaagcaatttttacgttgatctgaaacatggcggcaaaagaagataggactgcaaaaataccagtcaaaaccatcaaaaacacataccagaattcatacaatgtttcggtatcattgctgacccgcgacacaatcgaacctgctggagtctgatcaaaataccgcatacctaaactatgcagcttctcgaataacttggtccgcacatattgatacgtctgcaaggaagccatcgagtatagaaaccattgaaaaaaccagatgactgctttgatgactaccccaaagaaatagagacccgcaaagaaatagatgatttgattggttgctgactgttgtgtcagatagttatccatgaatgtctgcagaattctaggcaggagaatgttgacgattgataagagaaaagcaaagaaaatggctgcaaaaaatgtcttcttgaagggttttgcaaattgtaacatccgcttgatgatcaatttttgctctttaaatggaattgattttgaccattcagattcttgacgttccattatacttcactcccttcaattttggcttccagttgttgcttgtcccacatttttttgtaccagccatttttggctaacagggcttcgtgggtccctcgctcgatgattcttccttcatcgataactaagatctcttcggcatgcttcacactacttagccgatgcgcagaaataatcgttgttttgtcttttcgatagtctcgcaatttgtgcaaaatatcttcttctgttttggcatcgacagctgacaaggcatcatctaagatcagtaattctggatcaacaatcaatgcccgtgcgatggacaaccgctgtttctgcccgccagataatgagacccctcgttcaccgacccttgtttcgtatccttctggcaatgctttgatgtcatcattgattgacgccaaatcagcagccgcttcaaccgcttcttgtggtgcttggggtaccgcaaaacggatattgtctcgaatcgacatggaaaaaagaaagtgatcttggggaacatacccgatagagcccaataacgcattcaaagtataatctttgatgctgtgcccgccaaaaagaatgtcaccctcataatgatcatattcccgcatcagcaacttcaaaatggaggttttacctgcaccggttttgccaacgattcctaatgtctgtccttcatgtaaggtaaatgctatctgttgcagcgtgatttcttcggcatcatgatagcgaaaagcgtctaacgccacttcaattttaccttgagccggctcttggatcgcgtgttttttttcaacaatatgggttctttcccccagcaattcagatacccgatcatagctggcattccctcgttctaaaacattgaacagacggccaatggcgaacataggccaaaccagcataccaatataactaataaatgaaaccaattggccaatcgatatctctcctgacatgacaaaacgaccacccacaataatcgttaagacatatgagacaccgataatcaatgtaatgaaaggatcaaaaagtgcatctaaaaaattgactttacggttcttgatgatggcatcatcaattttggcttgaaaatcttgaatatcttctgtctcttgtccaaacgttttgatgacttttatcccagtaatactttcttgtgctttgtcattaatcgctgaaaaagcttcttgcgaatcacgaaaagcatcatgtagtttgctgcctaacactctagccatgaccgcaagaaatggcaaaggaatcaacgcaatcaaggtcagacgccaatcgataaaaaggatcatggcgatgatcgttgctcctccagagataaacgaatccgcaaaggttaaaatacccgccccagcaacgttttgaatggcgttcaaatcattggtggcatgggccatcaaatctccagttcgatgtttttgatagaaaagatgatccattttggtgaagtgatcgaataattgacgacgtaagcttttttccaagcgtgcagcactcccccaaatatttatccgccagacaaaacgaaaaatatattgtgctaatgcagcggcaagcaaaatacctatccaaaataaaatcgtttctatcgaaatctctttttctgcgatctcatcaataatgattccaatcactttgggtggcgctaattgaacgagagccaccaaaaccaatgcggctactcctatataataatgtttcctttcttgtctaaaaaaccaacctaactttctaaaaatcgacataacaccctcctattattcactcctgttggctacgatttgaatcatcgaaattttcggactattttggcaatgactgaccttccgatgtagttacatttcaattcctcgcgaaacacgttttgttacctacccaacgataggcacaattcatttgctcatctacgcttcgcttacagttcttctaagggaaaatcactaagatgaacttgcatgcctcgctgacgcggtcaatcgcagtgactcgcaacacgaggtattcctcctcatttgcttatctacgctctgcttcgcttacagttcttctaagcgaaaagcactaagatgaacttgcatgcctcgctgacgcggtcaatcgcagtgactcgcaacacgaggtattcctcctcatctgcttatctacgctctgcttcgcttacagttcttctagcgaaaatcactaagatgaacttgcatgcttcgctgacgcggtcaatcacagtgactcgcaacaccgagtaggtattcctcctcatctgctctgcctcgctgacgcggtcaatcgcagtgactcgcaacaaaaagcgagctgatgggatcagcccgctttttgcgctaaaaaacctatttttggtttttcatttgttgcatcatttgccgaatcttcttctcagaaggcttttggcccattgacatcatcatcgaacgcaacatatcctcattaacgggaggatttttcttcagataatcttgcatatatttacgcgccaaaaagaagccgccgacagcgcctaataataccgcgataacagcgatcacgattacaattcctaaactaaccatttgaaatctctcctttctcttgtactctcaatgaatcattttactagaaaaaaatacaaaaagaaagagagaaagcaggatttctccaaaaacattccctctatatatcagcttaatgccacatctcgtttgttgaacaaccagtttgtcaaaaagtagatcaataagctgtataacaaaagtccaatcgtcatttcccaataattcaaacccggatcaattattgcattttgcatatccgtttgatgcaataatgtgggaaccgtatctttgatattcataaaattaaatggattccacttcaaccaaggatatttttctatcgcaaaaagcatgatggagttgatgatgctgctcccgaacaacacagctactcctaatcccactgccatactttgagagcgaatgacggcagagatgaacagagtcatggtcatataaaatacaatcaacagtaaatttgttgctgcatagacaagagccacaactatagctggcaattgattataatccgttgatgtgaagggagattcagataccaaaaacaaattgctggcaagaaaactgcttagaaataaaaccagtgtgccaagcaaagcaaataagagtgtgttgatggcttttgcggctaatatctgacttcttgaaaatggccgaatcaacaaaaacttgatggtccctcgactaaattcttctgctaccgctgaagctgccacaataacaacaaataaattcaaaaatgacgtcatgtcgcttagaaaaataaatagatcgttggctttagtatcaggcgagcctaagcggaccacataggtgagtccgaatgttaaaaccaccaaaagtcccaacatgatccatgtggacttttttttcgtgactttgatccattcattttttattagtgtcctcattctagagccctccctcttccgtccaagccaaaaatgtttcttccaacgaagattgctgcaatttcatttcctttaaaccaatccctgcattaacgagggcagcagcgatctcagaacgattatccgtttcaagtgaaatctgtaatccatccgtcaaagcaagcccatcgatttggaatttagtcttcaagacatttaatgcttcctgatcgtcatctgttttgatgatcagtaggcttttttctgccttcaaggtatccatcgcgacttgatgggtcactttccctttttggacaacgatcagatgatctgcaatctgttcgatatcacttaattggtgactcgatactaaaacagaaacaccctgttctcttaacatgagaatcatttcccgaaactctctcataccctttgggtcaagtccgttcattggctcatctaatactaagagagtaggacgatggattaatgcctgtgccacacccaatcgttggcgcatccctagtgaatacgttttgactttttgattgatatattcttctaaatgaacttggcgaatcaagtcatccatctcaactgccgtcatttttgtcttcgccatgcgctggtattgcatcaaattttcgtaaccagtcagataattgtagaactcaggattttctacaatcgctcctaccgaggcaatggctgctttaaaagacgtttctagggaattccccatgatcgtaattgagcctttattgtgcttcattaagccaacgatcattcgaataatcgtcgtcttacccgcaccattcggtcctaataacccgaccacttgcccttgttccactgagaaagaagcattatcaatgatttgcttggttccaatcagtttaaatacatttttcagtgttagtatttctgtcatttcatccctacttcctattcgctatttttttactttcatgataatagttattactaccatcccactagagtattaaaaagtcaacaggaaaaagaatgatcttttcaatttggtcttcttacttccgaatgaacttcaaagaatacgagccagcttcatcaaattgggattttaaattaatgacatgatttaataaaaaataaacgtagtagaaatcaaattgtcatttaacaaatgatggaattggactgaacatataaatttataaagaggtgttttctccgaaatgtgaataattcatctgctgctaggaaaacttatggaaacttaggctgtcaaaaacctgtttatgcttttcgctccgaattttatgaatcttttctttcaaacgttcccagtcactgctggtgggctgaccattccaataaaaaatctccatttgtttgtttgcccctagctggcgatagattgggtaatcactgattagaatatctggttcatcaactgaaggaacatgctggattgctcgatgggaggtgttcaacaatcgatttttgatccataattcttgtgtcttgccaaatttcgattgaatagaaaaagttactggacgctcatatttaataaagactgttcgaacgagcatgcagtattgaaagataagacgatcattcttctttgcaaacccgacaagtggagggatttctctttttattgcgatcaaaaatcgtctcatcgttgggtacatgactgggaaataagcttcaagctcactttccctcgtttgttttccaaacccatctattttatgttctgttccaaaaactgatgagtaggaatgaatcatgagtaagttgaccaataaataatttttttctttcgaagtgagtgccaaatcaaagtatgcagacagtttgtcaataatgatctcctcagtcgaatactgctcattatcaaaccaatcctgatggatttcagtcagatcctcttccaaatatgtattcattactgcaaacataaaataaagaaaactgatttcttcgtccgtgagatcactcacagcgtaaacatttgcctgaaaaaaaggtgccagtatgcattcggtgaactttcttttagtcatcaatggatgctcgaaagtcgttatttcatcaggaatttctacgataaaatgtcgctgtttgattcgctgcaatgaaatagccagcagagataaaaatttattgcaatcaatttttcgcatgtaaggagcgtgacgctcaatttgagtagcaatagtttgcttgtcccttatcgttgctaaaagatctgagtccgtttcatcaaacaactgccaatacatgacatgataaaaataacgtatgtagtactcttttccttcaagtggatttccttttcttaaactgtatgataaatgataatttgctaacacttgattcaattcagtcaattttctttgaatcgtccgtaaactgctatatgtctcttggcttaattgctctaatgagtggtactttcccttaaacaacaaatcaagaaaggtaaatccgacagttctttccaccaagattgcataaactttgcttagcagaaatctaggtgaaaattctatcttgatagtttttgattctgattgataattaaccgtatactcagaatattgctcctgaaataattctacctgttgaataacagacaatagcttgctagttttatagttaaacacagccatcagctctttggttgaataagttgtttgattcctttcataacaataggtgagaaactggttgatttgtttttctgttgtgtcaaataatacatgaaacactgattgaccctcgcttaaatagttattcaaactttgccttcatttaagtttgatttcatctggacaactaaaaagatcttacaatattgtaagttagtgaatgttttgcgatcataccacttcaaaggaacgattgtcaaactacccgtcaaagtcttttattaaaaaatatcagctcaacaaatcttgcgatttgttgagccgaataaattgtaactgttcatttctggggaagaaatttccaatcattttgcttgttctgcctttttgcgacaatctctcaggagagtttacatgccaatctgactattctttatttacttcattatcagcagcgaccgcttttttatttacaatattaaatgaacttcttaaatgtctttttctgttctgagtgtttgtcctgccacaattaattttcatcattattatcgtatgaggaaagactattgggattgctcgtctccttaagtatactagtgtcaatgctggaactctcagaagaagacggtagatcaacaatactccatttacttggctttaaattctctatagttgtaacgtcaccatcgtaaacaatcactaaatccactttgtttttacacttgatctcagacattggtaaatctccacgaattcttaaaaaattctcaataccggaaacccattctacattcgttaaagtcgtttcaccaatgacctttttctcagtacccttaccatcccaaccataagttaacactgctcgaaccgatttggctgatcgtgttttattcggacgaataggtatcgtgatccactttgactgctcatcataaatgatacggttcgttcgtaaagtcaaagatagtttaccgggagctcgttcatttgccaaactatctattttaaagaaaacaataagtaaaataataaaaaaggcaatcaacaaggggattttattcatttgctcacttcctaaatctatttcaggttaacttgataatgagattatagtagtttttttagttaaccacgcgccaaaaaaaagacagaatcaggtggaaattggcatttttcagaaaacaaccaaaaaagactgacacaagaaagacaaaaagtcgcagcgaattcttcgaaaaatccagcagcaaactaccactaactagatcaatattttgtctcttcttatgttcagccttttaaatctgtaaggatattagatttgaaacgatacattcacacgttcatccaatctccaattcattttttctttttattttcgtttatagataacgtaagaaatcaaaagcatgcccccgagaatcatccatttatcattggtcattccggtttgcggtaattgaggattccctccattctttggcggtgccccactctgacttactttaggagcggataatgaagagttgtccacgctattaccattactgttggaagtcgcactctcgctacttaactattggtcgtactttcgttacttgtgctactcattgtactctcactgcttgcggtcgtactttcactacttgtgctacttgttgtactttcactgcttgcggtcgtgctttcgcttgaagtgctcgtttctccggtaccactgcccccgcctccatatttcggcgtgtagccagtagttgtgtggactgctgctgaatcattgatcaatgcttgaatggttcccttgtttgtatattgctccaaagacccatcagtttctgttttataggtgatatagattctctcactcgtatcccgcaaaggaatttcaaaagtgccgtctgaattaagcgtaattgggacttggtcaacataagtgggattagttacgcttggaccttacaccactcgtgccgtggtgctgatcaatgcttgatggggtccaagagtatcaatgaatctcccatttttaattgaaaccttattcgtatcataagaattgatataaatacgccaatcaatcgttcgtttgggttcttgtgtgcctagataaagcccttgtttcgtaagtaatgcacctgttccagtatcctcaacccctcgaataaataaaggaattgtcttaattccattaactgtttcaaaatcgagttgattgatctgatcgacggtaatgtcttcactaaattttgtccaaaagtaaaaatctccatgcacattgttgttctgctcaacaaactcagtaaatacaaaagtaagctgattcccaacttgggtgagatttactactaaatgaccgttctcatcatacagttcatagctattattgacaccttcaatctctactgggaggataatcgtcgctttgtccccggcctttaagtcacctaatccttcgagactccatttgagatcaattttgaaagattcgtcttcatctaaagtcgtcacttcttgattctgactattgacaacggatacatcagtgattaagtttgcccccacatccgtctctccgtatacgatttccataccggtaaaaatggggatagttagcaacagagcaacaagtacttttgcaatctttgaaagcatgtgatccctccctgatagttaataggtcaccgccagtataatttacggaaaattcagaagcaagtcatacgaactgtgcgagttatatcacaaggcagggcttcactttcaaattaatcatctgcttttcacagaaaaaaacctatcactcaaacaaagcgataggttttgtaaaaagactgactgattattctgttggatctgcatagcgatcaatttgttgattataacgtagttgacaacaaatataaaaaataacttggaacaataagtaaatacctacgatttcaccatagaactgccaaacgggcaattcaactaataaacgcagtgcggtcatcgcaacagcaaaatgaatcattgccacgatagttggcaaaaaatacataacttgtagctgatgacgcagaattttatgccgttcttttggtgaaacaccaagcacatgcaaagagcgatggtaagcgccgtccttgtcaagatccgcaaacaggcggaaatagatgattgatgcagagaaaataaagaaaacggagcccagtaaaacagtgatcattaaaatgagaccattgccttgacgtgtttcctggaaaactttgtattttgattgataaccaatatgagacggaatgccttcaagtgcttttgaccactcttcatcggacatctcgttgactttgtctgctcctaattcatcgtagatagcggatactttttcatctgtttctttattttcttgatcgatttgctgattgataccatcaattaacgtaggatcgtctgcccactcggggtaatctaaccaaacaaatcctcccgaatcttcagaatcaccaatttctttttgccacttctcaaaagtttgatcagttacaacaccaaggccaaaatagttcaacgaaagcattgagggactatgaacgatcgtcatatcttgctgaaaatcgctatctccgccaatttccagcggatacacatgttgtcgttggctttggtcaaccgacaacagttctttacgtcttgaataattgctgctaagttcaagcacttgatcatccataacaggttcagctttttctccgatttggctcatcaatttgcgataatcactttctctcatcaatgaaaatgcattgttcatgtaatatggatcaatagcaatcgctggattttcaagatttgtgtaggtctcaatgagatccacttgttccataaccggatgatagccttgcgcttccaatttttctttcacttcaaacgccttcgttttacctatttcatctttttcgtattccgaaaaaacatacgctacactaattccttgaatcgaagaaaacgaagtgttgccaatcgccatcattactgctattcctacaaaagccactgatgtactaatggcgatcagactgtacattgccgcattgtcccgcatacgaaaaatccattcactaatcgttaacaagcgtgttccttgtaaaaaagaaggacttcttttaagttgtttcaataagtaaacactaaactgatagaaggacaagatcgtgcctgctaccgtcaacaaaacgcctaataaaagaatcaaaaaaccgtcagctttgaaagaaaaataaaacacacatccgtagccgacaaagagcaaaagcaccccaaggaatgcatagatccgacgactcacaggctccggcctgggcttctcgttttctttgatcaatgatatgatcttttccccttgtaaagcacgcgtactaaaaaatgagatcagcaggaacatcaaaagatacacgccgattgttaatcccaaactagtcaatggaaccataaaagacaatccgcgattgagatgcattacattctgagcaacaagcaataatagctttgttcccaaaattcctaagccaacccctagaaaggtggccagcgatcctaataacgcattttcaataaatagaattcttcgcaaatccttctcttcaatccctaaaatgagatagatcgcgagatcacgtttgcgacgttttaagaaaacaacaaaggtgtaccaaagaaacatcaaagataaaaatgcaattactactaaagcaaccgctaatcccatcttagctagactggaaatggtatcgctcgctgacaagttttcttttagttgcggatggaacaaaagcagactaaatatataaaaaaccatggcagcaaatgtactgcttacgaaataagcagcataggtgcggaagttacctcttaaattacgaatgatcaactgtctgaaattcatgacggcgacctcctagatgtgcaagaacatcaagaattttttggtaaaattgttgctgatcacttccgcgataggcctcattgtaaagtttgccgtctttgatgaaaacaacacgatcagagaaacttgcggaatagggatcatgggtaaccatcatcgttgtcacttgtcgctgtttgttcattcggctcaaaatttccatgacatcacgggctgctttagaatctagattacctgtcggctcatccgcaagcaacagttctggctgatgtatcagcgctcgagcaatcgcaacacgctgctgttctccaccggacaactgatagatccgtttttttcttttgtcattgattcctaactctgtcaaaagcgcttcacagcgccgtttcatctcatcaaccggtactcgatccaatgttaagggcagcataacattctctgccacatttagcggagacaataagttataattttgaaacacgaaacctaactgtcggcgtctaaactcagcaagctgttgttttggcaatgtcagcggttgggcgccattgatgatgaccgagccggatgttggttgatccagagtcgcaactaaattcagcatggtggttttaccactgccagaaggacccataatgctaataaattctccggcaggcactttgagatcaatttgtttcaacacttccacagatacttcaccagtatacgttttagtgatatttttcaactctagtaaagccatagcactcactcctttgctgtcagtgtaacaggttttctgaaacaaacttatcgattgtttgaaagataacttacaattttgtaagtttcgttagctctcgggaaattttaattgcaggacagtcccttgaccgacttcagaagcaatcgtaaccgtaatcgagagtttttgactaatgagagagactaaatagagtcccataccggtagcttctccccgctgccgtccattgtcaccggtataaaaaggtcggaacacccgtggcaaatctgccgctgaaatgccacaacctgtatctgtaatcgtcagacttctgttcgcatcatctaatgcaaaagtgactgttgctttcggattcgagtatttgatggcattactgatcaattgaaaaagtagaatctgcaaccattttttgtctgttgttatccaaaaatcagtctcatccttaattttcggataaatttcatgccggatgaaattgcgcttctgttcaccgatgctttgcttgatcaatgctaataaggaggttgattcaatcaaaaagtcttcttcaaaatcttccagacgaacaaaattcaaggctgtggctaatccgcttttcaaacgatccgtctctgctaaaagatcgtaagggtcaatttgactactctctgccatcagttctaggactgagactggtgttttcatttgatggacccagatattcataaatttgatatgggtttgatgatgggcatcaatcgctgctagttgctcttgtacgtgatgatggtcgtcatctaaaagctttttgactcttctagctaagtaaccagcgcttcttccagataatcctgtttttagatagtggtagaaactgcgattggcgagataatcaatcgtgaaaactcctatcgctaacaagcccactaatagtaagccatagccgatcacaaaaccattgcgatacccatctaaccaaacgagcaaaaggatcaaagcaatcgacatcccaaataaagcaattgctggtaattgaactttcaaatattctttcattctggtctcccggcaataaaaagagcataaccctttccacgaatcgtttggattggttcatcaagaccgagacttaccattttttttcgcagacgaccaacatttactgacaatgtgttatcatctacaaaacgttcatcgtcccataatttattcaagatctgttctctggagaccatttctggataagccatcattagtaaagtaagcaattctccttcacgaacagttaacacttcttccttttctagataattcatctttaaagcctcaggataataaatcaattccccagcttttagttggcgagcacgattgctctgtgcatagtctccatatactcgccgaatatgactttttatttttgctaagagtaattcataagaaaacggtttgatcagaaaatcatctgctccatactcaagtgccatcacttgatccatattaccgtcacgagccgaaataaacaaaatgggtaccaaggattgctcgcggattttttgacaccaataaaaaccatcaaaaaaaggtaaattaacatctaacaaaaccaaatctggctctattctatgaaattcttccaagatcttttcgaaatcctgcggaataaaagtctcgaaggcatagcgagacagctgactttcaatcattttgactaatgacttttcatcttcaattagaaatattttcacagtgcacctcctaaagtacttctagtttaccaaaagcaacggatcacttccttaaaaaaatcagaaaaagattgtccacttatttattgtaagcaaaatgattttatagtaaactatttctcgtgacatgttaaatatatctaaaaggtggaaaattgatgaaaaatgttttagttgtaaaagcaaataaccgtcctgacggagtatctgcaaaaatgttcgatacttttgtagaaaatctagatcgaacagcagtagatgtagttacttttgatgtttacgcacaaccaatgccttatatcggacaaacattgttcgaagcattcggaaaattagcacaagaacaagatttaaaccaagaagaacaagaattgatgaccgtccgtcaagacgtcatgaataaatttgcagcagcagatacgattgtctttgcatttcctatgtggaacttgacgattcctgcggcattgcacacatttatcgattatattttccaagccggtttcactttctcctacaatgaagatggatctatgaaccaattattgaaagacaaagaagttgtcttgttaaatgcccgtggcggtgtttactcaggtgaaatgagcggcatggaaagtgctgttacatttatggaaaaagtatttggtggtatgtttggcatgacgatcagcgatgaagtaatcattgaaggtcacaatgcagacccttcaaaaactgaagaaatcattgcagccggcctagaaaaagtggcagaagcagcaaaaaaattctaataaaaaattaaaaatctcaggaatgataagcgaaccaacaatgcgaactagcagttatgggacagctttattcctgagatttttttattactgttaaacaagaccgtctttccaatcaagtggtaaaagctgagcaagcggcagactgcccgccttcgtcaagacttgcgcagaaagattgtcttcagacagctgactgagaaactcgcggcaacgaccacaaggtgagatcggatgcccctgccagtccacagccacaacttttgcaatgtgatgttctcccgcagtgatcatagctgctgcagctgcatgttctgcacaaaaacccatagaacaactagtgtcaatgcacactccagtaaaaacgttcccttctctggtaaggatggctgctgcaacaccgcctgattctgcccagggagacagttttcttggtgcaatcttcgcttgggcgaaagtaatcaattcatcaaactccatctattcctcctgctaaacccattctttcttcaataatcgaaacagttccagactaggttagactttttttacgccataggataatgtggttcattgctccatgatcttagtcaacaagtctggatcaaacgtttgttgctgcagcatggcgatttcaaaaccataaggagcttttttattctttttgtcttctccaacataaggagtttctaaaatttttgggagttgcttcaattgttcatgatggacgattttattcaatgcttcaaaaccaatcgttccaaaaccaatattcgcatgccgatctttatggctgccttggggatttttggaatcattgacatggattacttttaaacgttccagtccaatgaccttatcaaactcatttaagacaccatcaaaatcttctttgacgttatatccagcatcattggtgtggcaagtatcaaacgtcaccgaaagcttctcattcagcgtaacaccatcaataattgcagcaatttcttcaaaactgcgtccgatttccgttcctttaccagccatcgtttctaaagcaatctgagccgtttgccctttttccaagacttcgttcaatcctttgatgatttgcttgatacctgcttctggccctgcaccaacgtgagctcctggatgcaatgtgatttgcgttgcgcccaatgcctgtgctcgttgaatctccgcttgtaaaaacgacaccgcaaagccaaaattttctggtttgatggtatttcccaaattaatgatataaggtgcgtggacaacaatattcgaaatgcctgctttcgtcatgaaatcttgtccagcagcaatattcatctcttcaattttcttacgacgggtattttgtggagcccccgtataaatcataaaggtagttgcttggtagcttgctgcttcctctgccgctcccagcaacatttttttcccactcatggaaacatgtgatccaattaacattgattgtcttcctcctaaaaataagtcttgtctattatgcgaaaaaacattcattcacgctagttttttgcttgccgttttctttgactttatccactatattaagccaatccaaataaaatcagtacgagtgtcatgagaggcaaactaatcaagaaactgatagaagacacaaagccgactgcctcttcctccatacctgccaatacagaattgatcacaccgaataaaggaattggagcaaataccagtaaacacaacacgggcttcaaaaaagcgggaagaggtaaaaagaaaaagcagagaaataatagcaaaccgattccataacgcaaactcaaaatctttcctaccgttgcagcagcatgtttcggtaaacgaaaatctaaaaacaaaccaatcatgaacatcgatagaaaggtattggcattaccgataggttggactagctggatcaccccttgcggtaatgagagcccaaagctgcggatcagcaacatgaataaatagcaagtaaaggttggcgatcgtaataaattaagaatgatttttcctggctcaaaaactgtccgtttcccgattagatactcaatcaaaatggtggtgcctcctgccaacataatactgttacccatatcaaacaatgaaatcaaggggattcctaatggataaaaactttgtgcaaaaggaatcgcgaaatttccgatattgaacccggagccacaatacatcgaaaactgacgtaacacatcattctcttttttggttaggaaaaaggcagtcataatctgcacgaacgtgatgattaccgcaattaaaattaatgccagtgcgtccatttggatctgcatatcggcaagattaagaatgattgctgctggcagagtgacattgaggatcatccgagacagaatagatccatccgcttttgataggacctttagctgtttaagaaaataccccaaaaagatcattgcaaagagaccagcggcattcaaaaataattgtcccataaacgatctgtttcctcctctattgatttgaaaaaaagcgaacccactcagcggttcgctttttactcatttcactctctagcaactagctaaaatgtcaacaagaaatattttttcttcccacggcgaataacaacatatttgccgccgatacggtcttcttcgttgatcacgtaatttaagtcttgttggcgttcgccattcacatagattgccccgttttggatatcttcccgggcttgtcgtttcgatgcttcgattttcgaagtagtcaacaattctacaatgtttaactcatcatcattcgagacttgataggttgggacccctttgaatccttgtgcaatttcgtcagcagacagtcctttgatatccccattgaacaagctttcagaaatatgaacagcttgctcatatgcttttgcaccatgaactaatgtggtcacttctttggccaacgctttttgggcaactcgtgtttctggtgcagctaagaattctttttcaattgctgcaatttcttcaagtgataagaaagtgaagtatttcaagaatttcacagcgtcacggtcatccgtattgatccaaaactgataaaattcgtaaggtgttgttttgtcggcatctagccaaactgcattcccctcagttttaccaaacttggtaccatctgccttagtaatcaaaggcatcgtcaaaccaaacccttggacttctcgttcgcgacgtagcagttcaattcctgacgtgatatttccccactggtcactgcctccaagttgcaatagacagccatgttcatcataaagatttaggaagtcataggcttgcagcaattggtaagcaaattcggtataagaaattcccgtttcaatgcggcgttttacgctttctttgctcatcatgtagttgatggtaaagttcttccctacatcacgtaggaaatcgatcaattttaattcgcctaaccaatcataattattggctaaaattgctggattcgtttgatcctcaaagtcaataaaacgagacaattgatttttgatactttgagaccattccttgacggtatctaatgtatttaattgccgttcttggtccttgaaagatggatccccaatcatccctgttcctccgcctactaatgcaataggaacatgtcctcgttgttggaaacggcgcagcatcaagatcggtaaaagatggccaatgtgcaaactatcagcggttggatcaaacccaatatatagtttcacagactcttcgtttaattgtttgatcaatgcactttcgtcagtagtctgatgaaccagaccacgactttttaattcttcaaaaaagtctgaactcattttttttcctcctaaatcattactcactgttcatattaactgaaaatccgcctaaagaaaagccttaatcccattttggatcaatcccgtatttgttataatttgattgtgataacgagcaaaactatccaagtgcgttgatttttgctataatacaacggaatctattctaatatcattgaggtgaccatttttgccccaaaataagaaaaaacaaccaaaatctccaagtacgaaaaagagctggttttatttcaatatcagcttgcgcgtgctccattcgctctttttagtcgcaatttccttttcgattctgggcggttcactcgcactaggtatcggtgttggctattttgcatttttagtagaagataccgctgccccgtcaaaagaagaactgcagcaagaattaaccgacatcacagagacttcacagctagcttatgcggatggtagtaaaatcgccacgattcgatcagatctgatgcgtacatcggtttcttcagataaaatttctgattatctcaaaaaagcgatcattgcaacagaagacgaatatttcaatcagcataatggcgtcgttcctaaagcggtcgtccgtgccctcctctctgaagcaactggctttggtggtggcggtggatcgacattaactcagcaattagtcaaacagcaaattctctcaagcgaaactacttttaaacgcaaagccaatgagattctcttggcgatggaagtcgaaaagtttttctctaaagatgagatagtcacaatgtacttaaatatttcaccatttggtagaaataataaagggcaaaatattgccggcgtgcaagaagcggcccaaggaatatttggcgtcaatgctgccgatcttacacttccccaagctgcttttattgctggattgccacaaagcccgatcgtctatagtccgtacacgaatactggtgaaatcaaagaaaatctcagtgccggtttagatcgaaaagacttcgtcctctttagtatgtatcgtaatcatgacatctcaaaaaaagaatacgacgaagcaatggcttatgatttgaaacaagacttcaaaaaacaagaagccattgagcagaccgatcagagtttcctctattatacggttctcaatgaagccaaagatatcatcgctaaacaattggcggacgaagataaagttagcgcagaagaatacagtaaagaagaaacctatcagaaatatttagaattagcacaacaaaaattagtcaatggtggttacacagttacctctaccattgataaaaacatctataatgccatgcaagacgctgtgtccaaatatggctatatgctggataactggggcgatgcgcccattgaagttgggaatgtcatgatggataatgcaacaggccgtgtgcttgggttcattggtggtcgcgattatcagcaaaatcaattcaatcatgcgttcgatgcccaaagacaagctggatcaagtattaagccaatgctcgtttacggtcctgccatcgatgaaggcttgatgggttctgaatcaatggtctctgattacgcagctaaatggcgcactggtgaaaatgcggatgaaccaatcgttaacgcgacaaataagggaaccaatacctttatgtcgattcgagaatcattagaagtctctagtaatatcgctgcgacaaacatttttcaagacatttgggagcaagaaggtgacccattcttctcttataagaattatttgagcaagatgaactatcctgaagacaatagttgggcttatgagtctgctcctttaggagtcaccaacgtaactgttttaactcagaccaatggattccaaacgttagcaaacaaaggcgtttaccaggaaggttatgtgatcgaatcgatcaagaacaatgaaggcgaagtcttgtatcagcatgaacaaaaaccagttcaagtcttctctgaagcaacagcatcaatcatgaatgacatgatgcgcagtgtaattgacgaacaaaagacgtctaactttaaatccgttgttagtggtctggattggaaccttggaaatgccgattgggtcggtaaaacaggttcgacaaacaattggtccgattcttggctcgtggtctcaactccttccattaccatcagtagctggtctggtcgtgatgacaacaaagccaccgatagtagtgccggaacacgtaccgctcaatacatggcttatttgatcaatcgcatttatcaatccgaccagaaggtctttggagtggataaaaaattcgagttatccgatgatgtcaaaaagatcaaagtgtctaaggctacaggaacacttccaggcggcacggtcacagtagataacacaagaagaaccaatccaagcgacacagttacttcgtattggacaaaaggcggtcccaaagaagcatcctttgaatttgggattggcggatcgaatgccaattatgcagattattggaagaaaatcgcccctagccgaacaacaacatctacttctaccaatacagccacgaacaatggctctagaagtaccaataaagaagaaaacgccacgaacaataacaataatcaaaaagaagcagaaaaaacggaagaaaagaaaaacgagcagaaagaggatgactgattacgtcatcacagtcatttgccaaaatctgttttacctgaagaacgggaagcacatcgttgctcctgttcttttttatatctatatgtaaataaaaaaaccgctcctaagaacggtttcttcttttttctcacttatttcgttgaactcttttcagagataccatatggtaaaacaattgttttttgttctacttcttctttgttcatcattttcgttagtaaacgcatcgctacagcacccatgtcatataaaggctgtgtcacgctagataaacgtggacgggcagcttctgccaataaagaattgttggctgtaatgatttcaaattcttcaggtactttgacacctcggtcaatcaaaccgtctagaacaccgatagcaagttcatcgtctgttacatatgccgctgtcgctccactgttcatgattcgttcaactaatgccaagccttctttaaagctataaggcgcttcaaaaatcaagccttctgaatagtctaagttgttttcttttaacgcttctttataccctttcaaccggttttgaccgttgattggatcaatcaatgcaccgctgacaaaagcgatcttttgattgtttttggctagtaaacttactgcatctttcgtagctgctgtataatcaatgttcacgctccccacttgttcatcgggatcgattgagccagcaagtaccactggtgtttttgaacgcgaaaattcgccacggatttcatcagtgatccgatgacccatgaaaatcacaccgtctacttgttttgccaaaagattgttcagtacgtttacttccttcatactatcgccatcggaattcgccaagataatgttgtatttgtacatcgttgctacgtcatcgatcccacgagccaatgaagaaaagaacatattgctgacatcgggaatgattacaccgactgtagttgtttttttgctagccaatcctcgtgcaacagcatttggacgataatctaagcggtcaatgacttccagaaccttcttacgtgtcgctggcttaacatttggattgccgttcacgacacgagaaaccgtcgccatcgaaacatttgcctcacgagcaacatcataaatcgtaattgtttgtttttccatgatatatctccctttattctgttttcagaaaatcttatttacatttctttgatagaatagcaaactttttgcgaatatgcaaccgttttaattccgctttcatgaaaacttagtcaattttacatatttacggacaagcattctccagtaaagcgtgctaaaatggagaaagaatacttgaaagaaggttttttcatgaataaagaaaaaatacaagaaatgacaacgtggttagccagcaatcaagctgaggtcgcttatatctcaaatccttcaacgattgcctatttttcaggtttcaagagtgaacctcatgaacgcgtattagcactctttctttcacctgataaagaccctttcctatttacaccagctttagaagttgaagaagctaaaaatagtggctggccctacgatgtgattggttatttagatagtgaagatccttggaaaaaaatctgttcagagctagaatctcgttatcacctcaaacgattagcactagaaaagaatgatttgactgttgaacgtttcgaagcattgaatggtttccttccaggaactgatttttcacttgatatcactcctgtgatccagaaaatgcaattaaccaaaacagcagcggaaatcgacacattgcttgaagcaggtaattgggcagacgtcgcttttgagattggtttttctgctgtcaaagaaggtatttctgaaatggagatcgttgcagagattgaatatcaactcaaaaaacgcggcgtttcccacatgtcctttgatacgacggtcttagcaggtgccaatgctgcaagccctcatggggttccaggtaaacaacaaatcaaaccaaatgaactagttctcttcgacctaggtgtgatctggaatggctattgcagcgacgcaacgcgtaccattgcctatcacgagccgactgaattgcaacgaaatatctatgatatcgtccttgaagcggaactgactgcccaagcagctgttagaccaggcattactgcgggtcaactggacgaaattgctcgtggggtcatcgaaagtcatggatacggtgaatacttcaatcatcgattgggtcacgggatcggcacaacggttcatgaatttccatcattgattaccgggaatgatttggtgattgaagaaggcatgtgtttctccatcgaacctgggatttacattcctgaacaagtcggtgttcgtatcgaagattgtatctatgttactgaaactggttgtgtgccgtttacaaaaactgcaaaagagctactagtattgaattaaaaaaggagatggattatgacgcaaaatgtattggttttaggtgggacacgcttttttggcaaacatctcgtcaatgaactgcttacacagggtgcgaacgtaacgattgctactcgtggaaaaacaccagactcatttggtccaaaggtaactcgattgatttttgacagagaagatgaagacagtatccgatctgttttgacaaaagaaacttatgatgtgatttacgataatatcgcctatacctccaatgatattgatattttgatgcgtcatgtcactaccgaacgctatattgtcacaagctctatgtctgtttatccaactttccatgacaatctggtcgaaaaagattttgatccaacagcacatgcttatcgtcttgtgacctcagaacaagtgaactatgcagaaggaaaacgcagtgtcgaggagattttaagccaaaaatactcacaaaattcggcatttgtccgctttccttatgtggtgggaattgatgactataccaaacggttgtctttctatattcaatccgtttgtcaaaaaaaagccatgtttattgacaatctttcccatcaaatgagttttatcgattctaaagaagcaggaaaatttttagcatttttaggaaccagttcctttacaggccccgtcaacgctgctgctaaaggtaccctctcactggcagaaattttagcttatgtctcaaaaaaaactggcattgacccacttttatcacctaccggagaagccggaaaatacaatggcacgcctgaatattcgataaatgtagcactagctgaagcaaatggctttcaattctcccaactatctgattggatctactcactatgtgatcaagagatcaaaaacgcttaactatgtgcgccttcgctaaaaaaaacacatccaaactagaaataaatgcgtctgtgatctgtttgatcgcaggaaccgtgttgtcacggctcggcattttatcttcgtttggatgtttttttgctaccgattaaaagcagctcctttaactttcaaaagagaaagattatgcttctggattatttttttccattttatcttttaattcttctttgacttcttcaaaatcttctttcgcatctttggcttctgattttgttgttgcttttacatcagccgcttttttatttgcttcatgtttcaattcgtttgctgctgattttgtttcttttgcagcatcatctacgattggtttggcctcttctgccccttcttttaccgtttccttcatgtctgcagcggaagattttgcatcaataaaaatgtcttctgctgtttcttggacgtcttcatgaagatcactagcagaatttttgacttcgtcagcagattttttgaagcgctcagataaatctcctgcctgtttttttaattcttcaactgtatcgctagaagaactagctacattatcttttaagtcatctacttttgcagtcaatgaatcagtaaaacctgaagcttgttcgccaagtttagctgctttatctttagcgatctccactaaatcggtacttttatctttagccatatcaccataatcagaagctttatccaataaatcatcggcttgtttggctagtttgtttcgcaagtttttacctgactcgggtgctaataacagggctgctaccgctgctgctgtcccaccaattactgcacctaatagaaatccaccttttttactcattgaaattcctcctcttattgttgtttgttacggtctttgaaaaatttcattgctgtttgacctactttaccagcaacagttgctttagccgttgttcgacctaaactgccaactcgcgagaccaagttctttcctgaactattcaattcagagacgctggtacttaaatctgctactgcagtaaagagcggatcaatggtcgcaactttgccatttacatcctgcagcaattcattggtcttaaccaacaatccctccacttcttttgaaaggatatctacgtcttgggtgatgactcgaatcgtggtattggcttcttccactgttttatccactttggtcatcgttttgcttacttgcatcaataatcgtacaacaaaaacgacaagtacgacgaatgcaatcgcagcgatcaatgctgcaatctctcctcctgtcataaaatgtctccttccccttttacttatattaagaatagcatttcaaacggcgttctacaaataaaagactaacgaattttgttttttttactaaaatctatccgctttcatacaaaaccaaaaaaatgccgaacaactttgattgatcgtcagttgttcggcaagcgttcttcttacttgttctcttttgttggttttggctgggttgctgttttttcagttggtgttaattctttactcaattcaatcaagtattcttttagactgtctttgacttctgggtgtttcaagccatattcaatgcttgtcttcaagaaaccaaatttatcaccaacatcataccgtttaccagtaaattggcgagcaaatacgcgttgtgttttattcaacgtatcaatagcatcagtcaactgaatctcattgccggcacctggtttttgattagctaagatatcaaaaatttctggggtcaacaaatagcggccaataattgccaaatcactaggcgctttgtctggagcaggtttctccacaaagttcttcacgttgtataatcctttatcaacttgcatgccaggatcaataatcccatattttgatgtgtcttcatgcggaacatccatcacagcaatcgttgaagcatgcgttgtttcgtaatcatcgatcaattgcttcgttaatgggacttcatcttccatcaagtcgtcgccaagcattaccacgaagggctcatttcctacaaaggctcttgcttgtaggacagcatgccctaaccctttaggatgtgattgacgaatgaagtgaagattaacatctgtggtttcttcgaccaatttcaataattcagttttgcctttttcttgcagattcatttctagttctaagtttgcatcgaaatggtcttcaattgggcgttttgcttttccggtaacgatcaaaatatcttcgatccctgattgtaaagcttcttcaacaataaattggatcgttggtttatcaacgatcggcaacatttccttagccattgcttttgttgccggtaaaaaacgggttcctaatcctgctgctggaataactgctttttttacattcatttgtctctctccttatcgttacttttcaagcgtaaactcgttctcttctttgccatctctcagcatgatttctttggctgcttgttcgattgcttttccttcataaagaacagaataaatggtttcggtgatcggcatttcaacacctaaagctgctgccagttctcgcgctgcttttgtcgtcgatacaccttcaacgatcattcccatgttttctaatacttcatccaaactgtgtcctttaccaagtaagtttcccgcacgccaatttcgtgaatgaacactcgtacaagtcacaatcaaatcaccaacaccactcaaaccgataaaggtcaatggattggctcccatagctactcctagtcggctgatttcagctaacccgcgggtcatgatcgccgcttttgcgtcgtctccaaagcctaaaccagcaattgctcccgcaccgattgcgatgatattttttaatgctgcaccagtctcaaccccaattacatcattgttcgtataaatacggaaatagtcattcatgaacaattcctgcacatattttgctgattcttcattttcactcgctgcagtaatggtagtaatatcatggacagccacctcttctgcatgagaaggcccggatagcacaacaatatcttgtcgtttctctgtaggaatctcttctgccaaaatttcagatattctcttgtgacttccttgctctaatcctttcgatgcatggatgatcacgggacgattggttgccttttcggcaaactctttagcgaccgcccgaattgctttcgtcggtacaacgaaaagaatggcatcagcatcaatgatcgcttcttcaagagccttaacacctaaaatattttctggtagcttcaaatccggcagataatgacgattcgtatggtacgtattgatttcatcgatttgagctggattgttgccccaaattttcacttcatgaccattctcggataacacttgtgcaagcgcagtcccccaagagccagggcctaatacggctattttttgtttcacgatggaaacctcctctgttcatttacaataaaacttcactcaatcattttaccatagttgccgaaaaataactgctagattacatattcattttctccataggaacggttgtaatcttttacttttgtttttttacggcgccagatcaagacgatgattgcaccaaagaataacacagctgataagacttgcgatactcggatcggtccaaacaagtacaaactatccgttctcattccttcaatgaagaagcgtccaaaaccgtaccagatcagataccctaggaagacttcgccttcttttaaaagtccctttttcttacggagtaagatcaaaacaataaaacctaaaacattccagacagattcgtataagaatgttggttgtcgataagctccatcgatattcatattatcaataataaaattaggtagatggagactttctagaaaggaacggctgacttctgcgccgtgagcttcatgattcatgaaattcccccaacgtccaattccttgtgccaacaacacgctaggtgctgcaatatccaaaaaggtcactggtgaaataaaattgcgtcggcaaaagaaatacagccatattcctccagcgatcaaagccccatagattgccaatcccccagaacgagtattgaaaatttgaattggatctttcaaataaggttctaaatcaaataggacgtaatacagtctgcccccgataattgaaactggcaagccaatcaacataaagtccgttacatcatcggccttcaatcccacacggactgcttctctcgtactcaaccacatcgcaatgatgacaccggagacaataatgatcgcataccaatagatcggcagaccgaacaactcaaaagcaacacgatttactaaagctaacatataaactgttcctctctaatttccagaattttcttcgatcaactgtgtcaatcgattctcaaacgtttgtgtcgcatcataacccattgtttttgcccggaaattcatggctgcaacttcaataatgatggcgacatttcgtccggtttttactggaatcttgatttgcgggatatctacttcaccaatctgaacagttgtatcatccgtacctaagcgatcatattttttatctttagcccacgcttcaaggtaaactgccaactgcacttgcatatagcctctgactgcactggcaccaaataagttcatgacgtcgataattccgattccgcgaatttcaattagatgttggaggattttgggcggttctcccaccagtgtcagttcatcttgcttataaacatctactcgatcatcagcaatcagccggtgtccacgcttgatcaactctaatgccgtctcgcttttcccgatgccactatctccttgaatcaagacacctaatccataaacatctaccaaaactccatgtacgcttgttcgagctgctaatcgtccatctaaatagctcgaaagttcacctagcaatcgtgaagttgaaataggcgaacgcaaaattgcgatattgtgctctgcacaagcttggatcatttcctctgggatagccaatcctctggaaacaatgaatccaggtgtatcttctgaacacattttacgcaagaccatcaaccgctcttccggcatcattcgttcagcaaaagtaatttctttacttccaaatagttgtaatcgatcatgggaataataattgaaatagccggtcaattccaaccccggtcgcgaaatatccccggtgatgattgtccgttccaaacttgtttcatccccttggacgatctctaagttcaaagcctcagccaactcattgaccttgacggtttctgtcataatagtccctctcttcatctccattgattcttcagctgcttctttttcgcaaactgttcctctctattttatcattctatcttaaaacttactacacgtgttattggaactacctatttctttttattttatgctattatttttaaagaggagggatttaattgaaattttcagactatacttacgtacgaccagattttgattcttacaaacacaattatttggaagcgttacacaaccttgaggaagcagccaaccttgaatctgcaaaaacagccatcgatgaattaaattatttgcggggaacgatcgacacggcagtcaacttggcttctattcgacactcaattgatacgacggatccgtattatgaagcagaagatacattttggaatgagtaccagcctcattttgaatcactggattttcgtttctaccgttgtctactcgcttcaccgctagtggaagaattaaaaactatctatccagaaacgttctttttatttgctgaaagtcgcgtgaagttatttgatgaatcactgatcgaattattccaaaaagagaatcaactgacttctgattatggcaaattgattgcttccgcccagctggagttccaaggagacagctatacccttgcacaactacgcccttttactgaacacaaaaatcgtgaaattcgtttggaagcaataaacattcaaacagcattttttgctgaaaatgaaacgaaattcgacacaatttatgatgaattgatcaaagtgcgtacagaaatcgcccataaattaggcttcgaaaattatgttgcttttgcagatgtccaaatgaaccgctgggattatgatcgcaaaatgatcgaaacctatcgaaaggaaattttagaaaaagttgtcccaatcactcaaaagctgtatgcccgccaagcaaaacgtaatcagctatcaaaagccacttttgcggatttgccattggtctatccgaacggaaatgcaacaccgaaaggcaccgcaaacgaattagtggagaaagcccgtaccatgtatcatgaactgtctcaagaaacaggtgaattctttgacttcatggttgatcatgagctcttggatcttttaagcaaaaaaggcaagcaatctgggggttactgtacctttatccaggaatatcaatctccttttatttttgcgaatttcaacgggactgctgctgatgtagatgtcttgactcatgaagctggtcatgcatttcaagcgtttcagtctcgttggatcaaagagccagaaattctttttccaaatttcgagtcttgtgagattcattccatgtcaatggaatttatcgcttggccttggatggatgctttttttgaagaggaaactgcaaagtacaagttcgcccatctggctagctgtctactatttctaccttacggcgtgttagttgatcacttccaacaagaagtctacgaaaatcctgattggactccagagcaacgaaaaacttgttggagagacctggaacgccgctattgtccagaacgtgactacagtgaatttcctgatttggatcgcgggctttactggtttagacaaggacatatttttgagtcacctttttattatatcgactatacgttagctcaagtttgtgcctttcaattttggtatcgttcgatcgtagcccaagatcctactgcttggcaagattatttggccatttgtcaagtcggcggtacacaaacatttcttgaaattctcgaaacagctcacttacgttcgccctttgaaaaaggtgcgttagatgatactctgaaggctgttgatgattacctagagaatgtttccgaagaacaactaaaatagaccacacaatccacggaacgaacgaatcatcattgatttgttcgttccatttttcattgcagtcctttaaataaacgacatgcagtcacgaactagtcaaccaggtacgttaaaagaatagtcagctctttttttgccagctgctaggactaacttactaaggaccaacaaaaaagcaacgaatactcgctgctttcttgcttggctattgagccaattttataagcttattcgttcgcttttttctttcttctaaagaagaaggtaacaacaagcccaatgaatgcaatccccactaatggataaacttgattgtcactcgaaccagtttttggcaaaactcgctgttgacgatctttagcagttgctttgatcagtttacttccatcatttgactttggatcaactggtttagtttgatcattgttgttagatttttttccatcgtcggttgctggttgtttttcgatcacttgaatcgtagccgttgccgtaacagtcaattgtttggttgtcccaaatatgcgctcaaacagcgctggatttgctactttctcatttgaaacaacagaatagttcacctgataagtaccgaccttcctggtatcaacagatccttcaataagaagtcgttcaattgatagggtattgccctcacgatcagttgctgagacaaaattgttcttagcctcccattgatcgcctacatacactactgagtccttaacaactacgcttgtttgatctgctaaaactgtgatcgtagctattgcttcaactttaccattgcggtagctgatttcatatttgccaggtgtcgtagtatcgacatcccctgttatatccaattcagctactgacaacgtttttccctctttatccgtcgcagagacaaagttatcttctgcctgccatgtgtctcctacgtagagcgtactatctttggctaccacggttgcttgatcagacacgacggtgatcgttgccactgactcggcgtttccatttttgtaggtcacttgataactacctgcttttgaagtatcaacatcgccgctaacagttacttctgaaaatgttacgttattgccttgtttgtccgtcgcagaaacaaagttgtcctcagcttgccatgtgtctcctacgtataatgtgctgtcttttgctttgacgcttgtttgatctgctaaaactgtgatcgtagctattgcttcaactttaccattgcggtagctgacttcatattttccgggtgtcgtagtgtctaccgtacctgtgacggttacattagcgagtgatactgcttttccgtctttatctgtgacggatacaaaattgtcttccgcctgccaagaatctcccacatagagcgtactatctttggctaccacggttgcttgatcagacacgacggtgatcgttgccactgccttagctgttccattggtataagtcacttgataactacctacttttgatgtatcaacatcgccgctaatggttacttttgaaaatgttacgttattgccttgtttgtccgtcgcagagacaaagttgtcctcggcttgccatgtgtctcctacgtataatgtgctgtcttttactgaaatactggataaatctttttctggtgtgattccaatagatatctggttacccgttcgattgacttttacatccataccagattgaatatcttctggaacaacatatccttcaggaacttttgaaacgtataccttgtatttacctgtataaatatctgtcaactgtgactcgcctacttgatcagtggtggtgttgatcacagttccagtcaactgattgattaacattaatgaaactccagcaatcttttttgtcggcctttctgtatcaaagacatcaagtaaagcagacgttttatagataatcccttccgaatcacctgctgaaaattgcagatttgcgatagtggatgtcgcggtgcgctttgcttcggacaatgtatcaatcgtctcggatgaaatggtggctgatgcagaaatttgaccagcgttttgagaaaggacggtatagctgatctccacgttctccttaagcacatagtttgcaaaaaccagctgaatctcaccattaactttctctactttataactatcatcaggaacatttgagattctgatggagtttggatcgatttctccattggtgttgccaatagattttaagctgaacgttggatttacaactttctttgttccatcatcaatgtttttcgttttcacagtgacttgggttacgttttttgcgctagtaactgtcctttgactaatatcgataatgtctgttgcggtattagagacagtgaccgtcgatgacccttgttgattaccatacagtggttctttagcaaatcccggtatcagaattgatttcgtttcctgccaaccatttgcataatgataggcaatgatgtatctgtgatcagttgtcccaaaatcgaacgtataataattcgtcgcttcatcatgcgtgatggtagggtaattcggatctgattctttcatgacttgcgtattgtattgcccccgagcccagtattgaggataaatcccttccacttgatcatttgagacatcgataatggaaaatacgacatctgtattcattggtacatgtgtttctaccttcagatctttgatggtatcttgccgggcattaactaaaaattgatttttgcttccttgcaacgtttgttctgaatagttttttcttccagtggtaactgttgtattgacagtatccaagccatccgctgagatactaatcggaattttatctactgggatccgcgttgtagaagcgagactgtctggcacataattaaatccaatgtcaaattgaattgaacgattgattggcgtaataaaagtaactaaggaccctccctcaaccttctcgatacggtaatcttgatcgatcttgtaataatagttcacttctggaacttttctaagtgtcaaataatctggatgttcgacgaagattttaagattttcgacaggttgtgttgtgcttccttcaacgttgactgaagtatcatttgcataggcaccattttggttgtagttcccccaagctgtctcagctgaattaggatataaaactgagattggttgtacataatcatccccaatcactttgaatttttcattgggaatcaaaggagtcgtgacattcatgacgatgtctttttgatcaaaaggaaccgtaagatgaatcatggaaaatgctaggttactgtctttggttgccgtcaaggtcaacatgccgttagaattttcgactttaaagtattcatctaaaggtacattttgataaaaagcatcattgaccattagttgcttcactgtaagttcctgtccattttcagcggatatcgttatctgctgtccttttttcatttcagttggcatgccatgtaatgttaaatagtaggatcccttttcattggaatataaatttccaccggcaacagctgtataataccttgatgaaatttctttttcagtttgacttgtttttgccacaaaagaaattccacggtactccccagccgatggttcaagatttactgatccaaaaccggtggttggatagtttttgtaataagaatactgatggtaactaatttcagatatgctcatcgtgaattgatagacaacaccataagccttttgctgatccatttgtttgatctcaactgctgtattttgtaagtcattagctgtaattgtataatctgtgccagcggctagctccgtttgcgtttctggcgtgatattccctttgatatctacatcatagctataaacctttagtggttgcgattctatttttttgaaaactgctcctggggtgtcaataagttgcaaagagagtgtttccgttcccgagagcttgcggtctaaattataatacactgtaccatctagaccaaaaatgtttttttgttgctcgtacttcaatgattcgacatcttcataaagatcgatcgcataactggttttatttagatcatcaattgtcactttgatttgcggggtactttctgaataaagataactctttaattcaagggaaaatgttgcatcgtggatagcttgattaaaagtgatcgttacttgacgattggcactgtctacttgccaagtcgcatcgatgccttgaatcgtcccttgattatcggtaaatccaagggtgtccggcaaactaaaaacaacagttgttccagctaagtaatcttcgtcaatgatttcaaaatccaattttagtttaactggtgtattatttagcactcttgtttcctgtgtttggctgtactcttcatcagccatcgtaagcagtgttcctttctttaaaagttcttgcgcctttatttgtcgattggaacgagaagcattttcttctttcttaactattttgggatcagtagaagatttgttggtttcagtttctgcaacactagaatcttttatacctgatgtttcctcactttgatccacttcgttctcttcactggaagaagtatcaacttcttcttgactactagcacttgaagtgaatgaggaagcttctttttcagatgaagccaagataggatctttttctttgtctattttactagttgtttcagctggctgatcagcctcagatgtttcagcaatcaccagtattggcgttgtgatctgagtaagactcaatgcaataacaaccatactttgttctatttttttagtgattttcttcattattctcctccaatttatatatgtatttttaatcaatcgcttttcttattttcttacccacttctaattcttcaccgctaaaaaaagaaagaatgttgtttgttcgatcaattttcctgatttgtcctgtattgataatgtaggatttaaacactttataataagcgggtaggtccaattgcttgatgactttcaaggacatctcaatgtattcgatcgacttcttttggtgaagaacgatttggttgcgctcttctttgaccgttgtgatatagttgattgattctgcatccataacgatcaattctcgtttgttttcaagctttaataagtgctttttgcctaataatgattgctttatttctattgcttcaattaataagtttcttagttggtgtttaaacgcttcttttgtatcaatgatccctaatgggcacaggaggttcatttttttcatctgtatctttgaagcatcaattccataaaaagctatttgacattttttacattggcttctcaatcttcctgctaattgaaaacctcgatcatatcctttcatatcagtggaaaataagaataaatcattgatatcggtaaggtgttcattaataaaacgctcaaattggtccggcaggaaaatttctactgaagcacacggaagttggcattcttggatcgctttttttagccactctccattaaaaaaattatcatctactacataaacagcaaagttgcttaaatttgcagacatctaagttctccttttttacatcatttttaattgtattattaatcaaaaatgcccgcttgcactttcaagcgcattaaaagaacctttgtgcaaaaattcagctgtatttaagaacaatataactattcacttagttagtagtagtggatattcagcaagaattgtttccgtagattttagaatggtactctagcgtgggcggcttaactgcttagactattcaatttagtgaatagctattagtcaaaaaagtggtgcgatgatactgctcgtattcccatcgatccccttcataaaatactacttctatcaatatttatcactgcgaaacaataacaaatgaaactaatagacacgagtattttcacagatttttctactcaatttaacatgacacagctagatgaacatgacaaaaaatggttatttcgaagaaataattggcggatttgtctttcttttataaaaaattacaaaaaaagatgttttgcttttcttattattacagtttgtttgttcacattgttctttaatattaaacaacaaaaacatccacacgttctttcaacatagctagctatgtatcagaaacgtgtggatgttttattttgtatatttttcgatatggtgttcagtcacaatcatattgatcactgacataatcaaagcaaccagaatcgctgcaccaaatgaggaaaagccaaagttagcagctcctacaaaagttgaagtcaaattcagcattaaagcattgatgacaaaactgaaaagcccaaatgtcaacagcgttaatggaaatgagatgatactcaagattggtttgatcaacgcatttaaaatagagagaacaaagctggctactaatgccatcatgatgctacgtacatggaccatgtttggcagcaatactgccagagcaacaaaggtgagtgtattcattatcagtcgttgaaagtaggacattagaagtcactccagtcctcatcctcgactttatctgcttctttgcgcggacgatttgtttctttgttgttcgctttgtagtactgattgtcgtgtccatatccaccagagcttttgcgtccagaagggatcaagatcgccatgatgacataaagggtgatcccagggaaaccagctgtcactaatgatagaaagacatagatcacacggatgatcgttggatcgattcctaagtattctgctaaacctcccagagtacctgtaatcactacattattggttgatttcgttaatcgtttgttcatttaccttcaccttccttctgacaatctatctatagatctgatggaatcagattattgttctgtgtctttgataaagacattcccagtcgttgttgaaagatcgacttgtgctactttatcagctacgcggcggaattgcaataattggttcatacgttcttttttctcacgcacgatttcaaaattgctcagccgttgattgatacttcctaagctggtttttgccaagccttcaaatccaactgattgtggtaatgctactttgacatttccgttgactgagctagcatttaatttttgtagtcggtcttctttgtaagtgattcggatattaccgttcactagagaaattccagtattttgtggtgtcgcggtaagagtaacatccccattgacagtttcaatgatagcatcaaggatatctccatcttgaaccaagatatttccattgacaccttcaatctccaacatcgtagcatctactttgcggaaatcgatcgtaccgttggttgatttcgtataaacatctcttgccaccaattcgtcaaatgttacattcccgttcaacaatttcactgcaacatgatcataggtacgtgtcggcagatagaaaaccagatcagcgcggatacgcttgtttggaatttggaatgaaatgcgttcatcgtcgacatcaatttggcttcgtgcatcaaaagcatcgaaaggtgttgcagcatccattttaccatagagtttgattttagcatccactttcacacccggttgatcccacaagcggaattcaacatttccgtttgctagtttcacatcgatcaatgttgcttctgtttcagcatattcaaaggtatgttcaaatttcgttgctgctactcctggaactttcagattgatatctttccattccatgttgtcattcactgattctgaaacagcacgaactgtttttttcaagaattgtccaaattgagtacctgcatcaaccattttttcactgacttgagtaaatgtatcagaggcttgttctttccagtcatctggaatatcaagtttttggctgattttttcttttgtttgtgaccattggtctttgcgaatatttttcaacttcgcatccaatgtcgctttttcttcgctcaaactatctaatgaatcttctagagaagcgattgtcgcttccgtctcttgccgtgttgcaagttcttcttcagataattgatccaattcctcttttgtgttcaattgcatgaggacttcttgtgcttctttcagttcctcttttacaccttgaatttctacattgatctcatctaattcagcagaagcttggtttgcctcagttgccaatccgtccaagattttttcaagattttctttatcttgtgcttcattttgacgaagtttttcttcaccatcaaaagaagcttcttctttctcgtgggcttcttcaacttcttcaaaaaagtcattatttgtcttatcagcggatacttcagctgcagctttgttgatttgattctcgtctttggcttttgccattccttccagcaaatccaatgcttcttctgtagaaagcacaccttttttcactaaatccaatacacgttctctttcgttcatggaaattgcctccttcagcaaatttttgtttgcaagtttagcttacgaacctattatgcctgtttttccgcaaactgtcataggtcttaagtaccaagtttttatcaatccgaagttctttcaataaaagagtaattgttctgcttgaaatcagagaagatgattctttgtgaaaggaaaacttgtgcttatcagctttatctaaaaaactacaaaaaaactgtactacagaagaaccgaatagcgcaagaataacctcacacgttttccaatagtttatccatgatcccagatcaatgatacgctatttttcatctctcttcttacagtacagtccgtacaataataatatacattcatgtgaaagctgatgagctaaatctatattttgaacaaagatatgctcactacatcagctcagaacgattactatttaactcactgatcttaccagtagccaaataaacgatccattcgcaaatatttgtgacataatcaccaatccgctcgagatattgggccacagaaagataatccgtaccactgacaactgtctcaggattggctttcatgctatcgatcgttttataatagatatctcgatagtaatcatttacccgctcatccatttgtgcaatcatccgggcatcttcttggtccgtttttacataagcgaccaaaacattgtccaccatttttttgacatagtcagacatatcggaaatttctttctcaatctctgcaattcgggtctcgcctttaacacgaatcgttgactttgcgatagataccgcgtgatctcccattcgttccaaatcggaactagctttcatcacagtgatgatcattcgcaaatcagtcgttacaggttgttgcaaggcaatcatttcgaaacttttcttctcaagtcgaacttccatattgttgattgcttcatcgttttctattacttcttgagcgatctctttatcatgcttcacataagcacgaacagatttatggatcgcactacttacaagcatccccatttcataaaattgattgtgaagattcagtaattcttcttcaaattgtgtacgcaacattgctttttcctcctaaccaaatcttcctgaaatatagtcttctgtttctttctccctcggactcaagaatactttcttggtatcattgaattcgatcaagttgccatctaagaagaaggctgttttgtcagagattcttgaagcttgagacatgttatgagtcacaatgatcattgtgtatcgttcttttagtgtcaaaagggtattttcgattttacctgatgaaataggatccaacgcactggttggttcatctaataaaatgatttccggatcgacagccaatactcgggcaatacaaacccgctgttgctggccgccagacaaagaaagcgcactttgatgaagcttatctttgacatcatcccatactgaggcagctttcaagctttcttccacggttttatcgagaatctctttgtctttgacaccctttaattttaacccataaataacgttttcgtaaatcgaaaagggaaatggattcggttgttggaaaaccataccgatttctttccgtaaatctactgtatcttgttgcggactgtagatgtcttttcctttatatacgacactccctgtgatcgtgacaccaggaatcaaatcattcatccgattcaacgaacgaagataagtcgacttgccgcagccggaaggaccgatcattgcagtaatttctcctttattgatggaaagatcgattccttttagtgcttctttttttccataatataaatgcagatcttttgatgtgataatttcttctgccatttcttagcctccgtttactgatcggatcagattagccaaagtgacctgatacataatcttctgttgcttggattttaggacgcgtgaatatttttcgtgtgtgatcatattcaattgcatttcccaagtaaaagaacgcggtatagtcactgatccgtgcagcttgctgcatgttgtgcgtcacgataataatcgaataatcttgctttaagttgaccaatgtttcttcaaccgttccggtagagattggatctagcgcactcgctggttcatccaaaagtaaaatatccggcttcatagcgatggcacgagcaatacacagacgttgttgttgccccccggacaatgctaaagcacttttatccaggctgtctttgacttgatcccacagagcggcttgtttcaaacttgtttcaacgatctcgtctaatttcttcttgttcttttcaccatgacgacgcaaagcaaatgcgatattgtcataaattgatttactgaaaggatttggacgttgaaaaaccatgccaatccgtttgcgcatttcatagacatcgacttctttcgtattgacatcgacacccttgtacataatttgacccgttactttcgtattcgcaataccatcgttcatgcgattcaatgaacgaagataggtcgatttcccacaaccagaaggtccaatcaatgcggtaattttgtttttttcaaattgcagatcgattcctttgatcgcttcattcgttccataccatacgtgcagatcatttgtataaagagcgacgtcttctggtcgatcaaaggtaatgatattgcgttcttcccaattataatcattcatacagtgattctccttatgctgacgtcattttcttatacaatcgtttaccgattgcacgagcgccaaagttaaacaatagaacagcgatgatcaggacagctgaagcgccagctgaaacttggattccatcaggcatcgttccttctgtattgattttccaaatatggacagccaatgtttccgcttgtcggaaaatgctgatcgggctggaaacactcagcgggttccaatttgaaaagtctaacgctggcgcactctgacctgcggtgtaaatcaatgctgcggcttccccgaaaatacgtcctgaacttaggatcacaccagtcaatatccctggtgttgcttcaggaacgatgattcgcatgactgtttcccagcgtgacaatccaagcgacaacccagcttcacgctgtgtatagtggatggcttgcaatgattcttctacatttcttgttagtaatggtaaattgaaaaacgttagtgctagggctcctgaaataatcgagaatccgtaaccgaattggataacgaagagtaaaaaaccaaaaagaccgactacaactgaaggcaacgaactaagaatctcaatcgatgttctcactacatctgtaaaccaattctttttcgcatattcggataaatagatcccggcacctaatgaaatcgggaaactaatgatcattgtaaccaataaaagatacaatgagttgaatagctgaatcccaatcccaccaccttcttgataagctttggaaggtgaggtcaaaaattcccaactgatatgaggaatccctcgtactaagatataaagcaataaagaagccaaaatcaaaacaatgattcctgctacagcataaagcacaccagtcgcaattttatctgagcgttttgcattcattatttcaacgctcctttcttaccaatcaatcgaatcacaatattgaacaataaagacattaataataagatcagcgctaatgaccatagcacgttattttcaacagtccccatgatcgtatttccgattcccatcgttagaatcgatgtcaatgttgaagcaggtgtcaccaagctagacggcatcaatgccgcattcccgatcaccatttggatggccaatgcttcaccaaatgcccgagccattccaaagacgactgctgttaaaatccctggaactgctgcccgcaaaacaactttgtaaatcgtttgccatcttgttgctccaagagcaagtgaggcttcgcgatagtgtcttgggactgctcgcaacgcatcgacagtcattgtcgtcacagttggcaagatcatgataaacagaacaaatgtccctgccagaatcccaaaaccagtaccgccaaaaacagaacggaccgctggaacaatcacggatagtccgataaatccgtaaacaacggatgggatccccactagtaactcgataactggctgcaaaatcttttcaccgttgcgaggggaaacttctaccataaagacagctgcaccaatcgcaaatggtgttgcgataatcgctgataagaaagttaccacaaatgagccgacgatcatcggcaatgcgccgacaagcggctgtccatctggaccaacagcactagggttccattgtgtaccaaacaagaaatcaaacacatttactttatcaacgaaaaacgtggcaagcccacgacttgctacaaaataaaaaattgagatcacaaccaaaacgatcaatgcgatacaaagaaaactaatgagctttccccgctgctccatttttgctcgcttagattttttcgttaacacttcttttacattttccacgagggattcctcctcaaaaatcaaactaaattcacaaatattagtttatcgctcgaacatcaatttctgttaaaccttttgtaaatttttcggcaacattgtaaattttgtgtaaaggttacttgatgacatttccttcccaatcacgttcaacttgcattcttgaaataggaatataaccaagatccccaacaatgtgctcttgaacttcatccgaaaggatatactctaggaattctgctgtcagtgctgtaggttctcccttcgtatacatgtgttcatacgcccagactttccagtcatttgtcgtcacattttcgtctgtcggtgctacgccatcaatagaaagaacattgacatcatccgtcacataagagaatgcaacgtaactgatagctcccggcgtatccgaaacaatcgaacggaccattccacttgaatcttgttcttgcgatgggattgctgtttctccatccatgatccatttttcgaaggttcctcttgttccgcttcctgccgcacggttcaatagaacgattttttgatcattcccccctacttctttccagttggtaatttcgcctagaaaaatctttcgtaaattttctgtagagatatcagatacaccgacatttttatttacaataggagtgattcctactacagctactttatgatccacaagtgctttagcatcgataccagacttttcttctgcaaacagatctgagttgccgatatctacagcacctgcttgaacttggctcaatcctgtaccactaccgccaccttgaacattaataaatctgcctgggttttcattttggaattcttctgccacagtctctactaacggctgtaatgcggatgagccgacagcggtgatcgattccccttgatcgatccattttgcacatcctgataatagaatgaccaagcctaaaactggtcccaaaaatttcaattttttcatgataacgctccttgttctctccaaagttaaatacaattatttccattttaccattttatggaattgttgaaaattattatttgctaatatttctcactcctgacaaaaatttactccatttcctacaatcacttacagaaaataactaaaagtaaaaaagtaaaaatttttttcaattagtaaaaagaagtatattgtcaattcttactgtgctatactggataagaaaacaattattaaaagaacataataacctttcttgcttccccaatcaagaatagccccaaattatgttcgacgttttcgtgatttcatcaacatttccccaaatgtatgttgaatcaaaacggcggcagaagtggtcatttatgtaccagcttctgccgtctttttttgtccaaaataacggattattgtgttttatccaggttatctaaccattgtgtgagtttctcagcgatctgttgttgttgttcctcatttgaaatcgaggcagctccgtcaccacgctgtgagccgtaactaccaaaaccagcgtgattgcctcctgagattgtttcgaaaatagctgaatccggcaaataggtttttgctgcttgataattcccttgattcaatacctcgtcattgctagcagtgagagaaagcacaggcaaattagtctctgctaaactgcctttttcatctggataactcgctaagaaaaagactccctttaacccattcttttgactagcggcataacggcttgcaatcacgccacccaatgaatgcccgccaatcacatagccactatgtggaaattcgtttaaaatattctctgctcgatttcccccaaggaccgccatatcaaagggcatcttgacgattgcaaccgagtatcctttttcagacacctcttttgcccaaatactgtaactttctgcatctactagtgctcccggataaaaaacaacgagtggtttttcagggtctccagagaaataaagcgcatctcgtttctcttgcccttttgaaagagctgcttgagcggcttcacttgccggatagtgtaatttttgccagcccaaccatccacctgcaccgatcagcagtaggccgatcactagaccaagtagtattttttgatattttttcattttccatcctccaaaatcaacaaaatggaaccgcctgaaccaagcagtcgcttcttaactagtttgaagggagcggcacttgcgttcgcgtttccattttgtgggtaacttctttcaagtatttactgatgagccaaggctaacaattcacgcgcatgctctactgtcagttctgtgatttctgctcctgataacatacgagcaatctcagtcactcgttcttcataggataactgacgaactcgagtctccgtccgtccttcttggatcgctttttcaataaaatattgataatcagctactgcggctacttgcggcaaatgagtgatacacaatacttgggaattcaacgcaatttttgagatcttttcagcaattgcttgcgccacgcggccactgactccggtatctacttcgtcaaaaacaatactcgtgatcccttgtttccgtgaaaaaatcgatttcaatgctaataagatacgagacagctcacccccagatgctacccgaaccaacggcttcatgccttccccaggattggtcgtgagataaaaagccacactatcaaatccagtagctgtcaactgcttgccatttgcaaagcgaacttcaaactgtgcatgttccatatagaggtcgttcaattcttgcacaatttctttttctaatcgatgtgcgatttctcgccgcttgacatggagttgttcagcaagagcccaaacagcatcggccttagctgtcaattgctcttctaactgttccagctggccttcagtataggcagattcagagatctccttactaatttcttcataataagctaggatgacggagatggactcgccgtatttgcgcttcaattgacgaatcgtttccagtcggttgataacttcttctagacgtccttcatcaagttcaaggttatctaattgtcgtgaaatatcagaagcagcatcctgcaacaaataataagcgctctggatcgtttcagtgattttttcataggcttgatctaagtgggcgatagattggatctcggacagtgccacactcacaccgtcgacactgctcatttcttctgaagagagcgcaccataactttgccccagtgcatcgacgattttctgatagttggttaacttctcacgttcttcgatcagattttcttcttcgccctcgattaattcagcctgtgcgatttcttcttgttggaatcgcagcatatccatccgttgaacatataattgttcattttcctgaatattgcgaacctgtttttctaaattgcggtattcctgataggcatcctgatagtgcagcagttcttctttgaaaccatcatcgccaaacccatctaccaagctaagatgcctttccggctgtaataactcttgatgttcgttttgtccttgaatatcaactaaaaaaagaccaatctttcgcagatttgccaaggtgaccgtacgtccattgacacgacagattgtttttcctgcttgtgtgatatcccgttggacgatcagcacatcttcttgatcaatgcctaattcttctgtcagttcttgaaactcagactgctgcggccattcaaaaaggccttccagtcggcatttctctgctccttgacgcaagtagtcagtagatccgcgtccgccggctaacaagcccatcgcatcaataatgattgatttcccggcacctgtttcacctgtcaaagctgtcattccttcatgaaaagaaaggtgtaagtgggaaataattgcgaaattttgaatggtcaactctaaaagcatggattgcctcctctacataaatcgttgaaaatctttaaacaaagtttctgcatctgcttctgttttagtgatcatcaatacattgtcatcatcatttaaggtaccaaacagttcctttgcatattgtttatcgatcaaatttgccaaagcggaagcatttcccggcaatgtgcgtaaaataacgaatttatccattcgatcaacagaaacaaaggcagctttcaaaatcttttctaatttggcaatgacatcttctgacgtttcttgaggaatgctgtagcggtagccacctttttgtgaagggactttgactagcttcatttctttgatatcgcgggaaattgtcgcttgtgtgaccgacacccctttttcctgaagcaattcgacaaattcttcctgtttttgaatatcttgctcactaagcaatcgtgttatcaaacgatgacgctctttttttctcatctctcgttcctcctgattgaattcctactaattttatcctatttttagacagaaagaaagagagccggcatgtaaaataccagctctgcaaaatcagtaagtttttggatgatgaaaggtttcatgtgcttcagcaacgatctgagggacagagatttcggctttccttgtgccatcaccattctgcactttctgtagatgaaccaaaaattcaatgttgccttcaccgcccgtgatcggtgaaaaactaagatcaagaatattaaagccattcgattgggcaaagtccaagatttcttcgagaaccctttgatggactgcaggatcacgaacaatgccgttttttccgacagatgctttccctgcttcgaattggggcttgatcagcgctatgacttctccttggtctacgagaatttcatgtaacggcggcaagatcaacttcaaagagataaatgacacatcgatggttgctctttctggtaatccttctaaaaaatcagtaggtttggcataacgaaaattcacacgttccatcacgactactcgcggatcttgacgtagtttccacgccaactgattgtagccaacgtctaaggcataactcatttttgccccattctgcagagctgcatcagtaaagccgccggtagacgcaccaatatccagcagaatttggtctttcacctcaaagtcaaaaattttcaaagctttttcaagttttaagccaccacgggagacataaggtagctttttgcctttgatttgcaactgtgtctccccgctgattttttcacctggtttgtctaaacgttcatttttctctgtgtaaactaatccagccatgacaccgcgcttcgcttgttctctggtttcaaaaagtccttgttggaccgctaaaacatctactcgttcttttttcattactttcctctaatctcgaattgtttgacaacggatgtgatcaatcgttgatcgaaatgtccataactgctcagttcatctaacacagcatacgcttgattcaattcatccttcaacgcttcactagcgccatcaagtcctagcaaagccggataagtacttttagctagtgcatcatctcgatggacaatcttgcccaatacttctgttgtactggtgacatctaaaagatcatcgcggatttggaaggctaagcccatatgacgagcaaattgatcgagcagctggataacttcttctgtctgatccgctaaaataccacctgcaatcactgcaaaacgaatcagttcacctgttttgcgttcgtgaatgctgatcagctcatcaagtgtgagttgctgattttccccttggatatctgctgcctgtccagccaccattcccgctgtgcctgccgtatgactaagctgctgcaaaagcaaaattttcttatctggttcaagatcagctaacgataacaactgaaacgcagcagtcaatagaccgtccccagcaaggattgctagtgcttctccatagactttatggtttgttggtttgcctcgtcgcaaggcgtcatcgtccatcgccggcaaatcatcatgaatcagtgaataggtatgaatcatctctagggctgctgcagtctggtatactcccaaagtcattgacttatggaaagaagcaacggtcgctgtcaacagcagtggacgaattcgtttaccgccagcatgaatggagtagagcatactatctttcaacgtttgatcacttgtatgctcttctagaaatcgaacaatcacagcttcgatctccgaaagatatttttcttgaaattgttgcatgttatccattagtcttcctcatcaaaaagaacttcttcattgttttcagtcatcatttttgttaatgatttttctgctttagccaatgtatctttgcactgtttgcttaataccattcccttttgaaaagcgtcaagagcttcttctaatggtacatcgccttgttccagctgagtaacgatttgttctaattcttgtaatgattcttcaaatgttggatttgccatgatcttctccttctgttgcaataactttaacaagcgcttgaccatcttgataatggacgttcaactcatcaccagcttcaatatctgcgatggttttaacgacttgctcgtctttcgtcgtaaaactgtagcctcgtcccatgatttttagagggctcaaaagatctaacgattggagagcacttaaaaatcgctgttcttttttttcaacgctaagttgaatggctttttctagtcgttgcgttaaataagtaacttcttgtcctgcagctgatagccgtgccttaggtagctgttgttccaaacgatgaatcaactgactggccaccttctctttatcatagagctgtgtttgcaacgattgattcattcgttgctgcaactgatccagcttaatcgcttgggcctcatataagcgctctggttgacgaaaaatataagaacctactgcccgttggaaacgttcttgtttccgctggatttgatacataaatgcttgttcaagccttgtttgcttctcttcgatccgtaaaatttcttctgaaagaactggcactgctaattcagcagcagcagttggtgtggctgctcgtacatcagccactaaatcagcgatggtggtatctgtctcatgtcccacagaagaaatgactggtgtctcggcagcgaatatggcacgtgcaacgcgttcttcattaaatggccagagatcttcgatagaacctccgccgcggccaataatcattgtatcgaaggtgccatctgcttctactcgttggatattttttactacatcatctgctgccttgtctccttggactacggttggaaacaagacgatttcggcaatcggatagcgccgctgcgcagtggtgataatatcccgaatcactgcgccactggggcttgtaagtaccgcgattcgttttggaaatcgtggaaggatttttttgggagctgaaaatagcccttcttctgctaattttttcttaagttgttcgtaggcttgatacaacgcccccactccgtcaggttccatgtgttcaatgtacatctgataatttccgctggcctcatagagtgaaatgcggccaacagccaacactttcattccttcttccggctgaaatcgcagcttgtcaaaagctcccttgaacatgactgtcgaaatttttgcgccatcgtcttttaagctaaaatattgatggtttggccgtctgcgaaaattggagatttctccagtcaaatagacccgttccaagtaaggatcagcatcaaacttgcgtttcaagtatttggtcaatgcggtcacagttaaatattgttgtgccatgttatctctttacagtctcctttgccgctgctaaggtttgtgccatcagcatcgtgatcgtcattggtccgacgcctcgtggaactggcgtgatatagcttgcgataggttcaacttcagcaaatttcacatccccaatcaattttcctgcctcatcacgattcattcctacatcaataacgactgctccttctttcacaaattctttagttacaaaatgaccgcgtccaatcgcaaccactaagatatcggcttgtctagccaatgctggtaaattctgtgtttttgaatgtgcgatcgtgacggtagcatttttaccgagaagcaaatgtgccatcggtttgcctacgatattgcttcggccgatcactaatgcatttttaccttcaagtggaatatcatacgcttcaaacattttcataataccgtaaggggtgcaagggattcgatcgggaacaccagcaaacaatttaccaaggttgataggatggaaaccatcgacatctttttcaggtcggatagctagcaacactttctcttcatcgatttgttttggcagtggcagctggactaagataccatgaaagtctgggtcctgattgtacttgtcgatttcactaagtagttcttcttcagttatcgactcgggataatgttcaactttagatcgtatgccgattcttgccgcagccagttctttgtttcgcacatacgtttgacttgctttatcttcccctaccagtagaacaactaagccgggaacaattccttgttcttttaaaagggcggtttctgcagtaagatctgcttgcattttttctgctaattcttttccattaatcaaaatacccatcttgacaactcctctgacttttttctattctagcatagttcgctttgaagaaaaatgatttctggtaggaaaatcatcgtttcccatctctagtatcatagcattttctcattgcaactgcttaaccaaagactcacacagaacaataaaggcagcctcttttgcaaaaggactgcctagttttcactatttatttgtagaaacctaatcaattcaaaacccgcagttttgatataatgagtctgattgatcagctattcttcactcatttttcacaaggtttctgagagtcatcggtgccgcaaaagtgtgatagtttaatcctgagattgaaggattttgtaacactgagttttgattttggctgataacgatcataccggcagttgtttccatcagttctttttcggctgcaatcatcgtttcccatcgcttgttctcatcaagagcataggtagtgctggcatcatccaataagcggtcataaaaaggattcgagtaatggcgattgtttccgctatacatcatcttaagtgtagaataaggatcttggtaatcgggagtccaataaattaggaacaaatcatagtcgctttcactagcaagattcaacgctgtttcggctggcagcgagcgcatattgaccttcaaaccagtaaagaggtcctccaaactccattggatactctcacccatttttttgtaggaaccatcatcagtcgttaacagatcaagctcgatttcatcgcctaattctgcttttgcctgttcccaataggctagcgctttttctttatcataggccatcaaatcaccggcttcctcacgaaagtccacgccagtatcaggattagcgacaaagccttctgtgatcgcgccattcaagggtttggatccatctgccataatattattgacaagattctctttatcaatggccaatgcgagagcttttcgtaaattttcattttgtaaaggtgtcggttgtccctttctttcttgatttaaccggatataattcatcgttgccgaaggataagaggcaaattggtcacttgactgcatttgtttggcgatctctccactgatgattgcgacatccaactgtccatcttcataaagatttagcgcggttgcagattcttttaccacatcataatggatctcttctgccagaatagcttcttgatcccaataagattcattcttggctaaatcccaattcatctcagtttgctgccagttttttacaacaaatggtccattataaacaattttgtcgctggctgtcccatattcctgtccaaatttttcgacaaccgattgattttgaggaaagaaaatcggaaaaaccatcaaggaagtaaaatacggagctggttgtgtaagacggacttctaatgtatagtcatcctttgcttcaacacctagcgtatccaccgactgatcaccacgggcaatttcttccgcattttcgatcaatccattcatcaagaaactatactgaaatgcattttcaggatcaatcatccgtttccaagcatattcaaagtcattcgctgtcaccggatccccattgctccattgtgcattttcgcgtaacctaaagcgataagttttgccgtcagacgaaatttccggtaaatcaactgctacacccggctgcacttcatccttttcatccaatagatataagccttcaaaagtggctgtttgaataattgcatctgggaagtccaacatggcagccggatccaatgaagttagctctgtcatagacattagtcgaatcacttgagaggctgaatcttctttctgctttgttgttgtacctgctgtacatccagtcaaaaatatcattgctactatcaaccccaacaatctgttaaatccttttctcattcttttcctccttttttatcgttccaccaaaaaccacacagcctcagccgtttctgtgccatcattgtagttgatatgcccttctccggcttcgatccattgacagtctcccggatttccagtgagatctgttccgtcttctaaaactatatgagcgcttcctttgatcacataggaaaattcatcttgtgtgtgacgtgcaaatccctctaatggtcttttctcacctggagctaaccgaaccactcccatttgaacctttccgttggtttgattcaatgaatcaaatatcgtttcaaattctttcccattatccgctgaaataattttcattttttctgactcctttcaattattactttcaattaaatcgtcagaatattctaaagtcaatacttttattcaaaatatcgcttttatttttatttttcagctgtttttttgaaaaaattacttttattaacacttctctctgtagaaagatccagtttttcacctcaaccaacttaataacaactatggcattgtatcgcaaataaccaaaaaacagcctcagcttttagctgaggctgttttgattaactagtcattcttactttcaatttcactgttgacattagacaaaataccattcacaaattttcttgattggtcatcactgaatgttttggctaattcaatggcttcatttaacgcgactcgattaggaacattgtcaacatacaccatttcatataatgcaattcgtaaaatcgttacatccatttttgataatcgttggatcttccaaccggattttaaatgggactggatcacttcatccaacgcttctttgtactgacatacccctgctacaagttgatccaaatacgctggaacgaagtgttcctgttcttcatcaatcagctcatggtgttccaactcaattgcatgcatgatcgcatcttgtttcgttaaatctttattaaaatctaaaggaaataaggcttgcagagccattttccgaatctcgtgacgtgataattctttactcattttcttcctcgtcgtttccgaataattcttcaatatcaggttgctcaatcttttctggtactacagctaccacatggacattgacttccgctaagtgaacatctgtcatgaacaatacttgctgtttcactcgatcttgaatttccattgctactttaggcacagaaacgccatagcttagatagcaataaagatcaaccttgatcccagtttcatcgattgtcaagtagacccctttgccatgcgcggagcgtccaagcaattcagtcacactattggctaatgtcccccgcatcccatagacaccttccactttagatgctgcgataccaataatgatctcgatgacttctggtgcgatcacaatttcgcctaattcaggacttgcgtctaagactagatttttatcttcattcataagttttgcctccattctaaacttccacacattgttatctatcccttcacgatatgtttcgtctcaataagtcatgacttggatagacagtttcatttgtatagaggtttcttctcgccctaagtttatcattttctgcactgagaatctataataacccactattctcaatgaattttctgaaataaacgaggatgttgatttacaagatgatcaattctttaggagaatgcgtcaaaacttgattaccagtttctgtgatcaacaaatcatcttcgattcgaacgccgccgatacctggaagataaattcccggttcgtctgtaatgacgttgcccgtaacaaatgctttgtctgctcggaaagagacgtttggtccttcatggatctctagaccgattccgtgacccgttgaatgtccgaaagcttctccatagccgaatgaagcaatatgatcacgtgcgattgcatctaattcaattcctgtcatgcccggtttggctgcagctaaaactttttcttgagcttcaaggacgattcggtaaatttcttttaatttgtctccgggatcacctacggcgaacgtccgagtcatatcagaaacatatccttgatagtagcaaccaaaatccagagtgatcaaatctccttgttcaattactttttcactagctaccccatggggcatagctgaacgtaatccactggcaacgattgtatcaaaagaaacgcttgtagcgcccaaagaacgcatgaaaaagtcaagttgattggctacttctatttctgacattccgggacggatcattttcaaaatatgttcaaatccttgatccgcaatatggcaagcttgttggatcaacgcgatttctgactcatctttgacttcccgcaatgcttcgatcatacctgaaacaggagccaatgaagattcttcaataatctcctccaagaccgaataatcagaaaagctgacgtaactttcttcgaaagccaaaacattgatctcttctttttcgcaaatagccgcaacttcttcaaaaatcggtccgctattttttacgatttcaaatccttgtgcttgagcagccgcttgctctgtataacgaaaatcagtaacgaaaaaagctttttccaatgtaatgacagctaaaccagtcgtgccggtaaaattagtcaaataacgcaaattgtatgggctcgtgatcaaaaaaccatcaacggcatcttttctcattgcttctcttaatttttcaactcttaacattctttctccccactttcttgttctgtattattatagcaaacttcccagaaaagcgaaaagaatgaaaaaaatttatacaaaaaaagacagattgcttttagacattctttaatcctcgttaatctggtctatcaaagaaaacaaattcgtctccatcacacgcgccgttaaaatgttttcaccgctttcaagaagggtaatcagtgcatctacggacatgcgtgctgaaattccataggtttgtacaccgtttttttgaatgtaggtcaacgctgtttcaatttgttcaacagatagaatatcacgcgcgtcattcgattccaaggctaaaaagtctttctgggttagtaagtatttcaacatcgattcaaaatgcgcagcggattgttctgtttctgaatagtctgattgttgtttgctagttgcttctgataaatccagaaaaggaaagtcttttaaaaaactctcttcaagtgtcttttcttctgggactacacgagaaaaactattggaaaacccaagcggctgaaaatcttgatttccagttgccccccctgttcgaacagctgtccagagaatttctcctttgggtatttgatacatctgccagtctctcaattcttccaaagataagtctttctcaaaaattaatgtggtgatcaatgaagtgcttttgggcaatttttttaaattgttcaaaaggttctgcttcattgtctgattctcagagaattcaagactcgatgaatctcgcatacgtgattcaaaaagaaaatcttttttttgcgaattagagagataattcttcagcaagtgatttttatcgatcgttactgtctgaatcgtagaatgattctgatcgagattttgataaacttctgtcacctcataactgccaaaacctaatgaacgtatttcatacttcgatagaaaatgattttgcgtcgttaactcgttattgatttgacgattcatgatgtaactatcttgatttacttgtagactactttgccgaggatcatagaaaaagaggtcaacaaattttggcattacaagtaaaactgcaattgtcagtacaacagctgcaaaaagaaagaaaatccctcgtttgtaacgttgttgtttgattttcctttgcaattgttcaaagtgaaatggttcattcatttgttaattcctccttaagtaattgtcttcctcgatacaaacgattcttcgcttgcgtgtagctccattctttatacgttgcaatttcctcaattcgccactccaaaaaatagtatagtaaaatcacttctcgcgtatctttaggtaatttctcaatactgcgatacaatgctctttttctctcttgtcctattatttcttccaatggggtagacaactgttggctttctgcttgaaaaacgtgtgaaggaaactttcgccatcgatgtgccaccgtttgtttacgcgtccagtcaatgaagcgatttttgattatttttagtaaaaaatagttgatttgcttttcgtttagctcatcgagagattccgctatgacgagaaacgcctcactgactaaatcttgggcctgctctttattttttgtaaaataaaacgcatacaaataacagtcttgcgagtaatctttatatatttttgctaacagttcatctcccaactcagtcacccctccatacctactatacgaactcacagagaaaaagtcacaaaaaaaaagccattcattaaaaaatgaatggctgtaagttattttctacgtcccaagaagaacgaaacaacagcgacaaaaatgaccgctccgataatggcaggaacaattgccattccagcaatctgtggtccccatgttccaaatagtgcttgaccaatcgatgccccaactagcccggctacgatatcaaagatacaaccgcgtttctcaccagcgattgcgcctccgattgatccgatgaccgcacctacgatcaatgtccataaaaaatgcataatacccctcctaaactttctaataaaagggtaccacatcaattatggtttgaacaagaatatgcctgcatgttattttctgcgagtgaacgcccgctttagcacatcgaaaaagccaagagaatgaaccatatgatccggatcaacatagacgcgaatcgcccgcaaaactttcttgggctctttcgaagaaaaagtataggtgccattttttttcgtccgaatagcgtaccttgggatccaacgacctttgaacatgacagaggcaatcacgtaatctacatcttcccaaggaatctggataaacttccgctggtcacggtcgttgtaaaattcaaaagccttgtcgccgatcataattttgccatattcgttgatacccaaaaatgaggtcgcatcgatcgtcaaatcaactttggtgttcagggattgtaccataatttgtttgctccatttctacgtcttattgtttcttattatacttgttctgatgatttttggcgaatagataaaaagtgcttgggtttccccaagcacttttagttgaaagattagaacaatccgatcaagtgtccaccgataccgactaagaacaaaccgataatgatgatgattggagaaacttttttcttcaataaccacatacataacagagtaagtaatagtgcagccaacccaggaatcaattgatccaagttgttttgcaaggttgttactttcgtatctgttaatgcacggccttcagcgacttgttggaatgcttgttgtaacccttctggacctgatggcaattttgcccaatccacatatgctccttcatcaagagggacacgagatacaactggtgcaaatgaaattgatacccaacgttgaacaagcgatcctaatacgaacatccctaggattgaagcaccttttgttacgtcttgcagcaaaccacctgaaaggtcatctgtgatttttgatccggcacggtagccaaattcttgtgtataccacataaatgcccaacgaatgatattccaagccaagaagaagatgattgggcctaagatgtttcctcctaacgctagagaagcacctagagctcctaacatcggacgaacagtaaaccagaatacagggtcaccgacaccagccaaaggacccatcataccaacttttaccccttggatcgctacatcatcgacagcggctccattggcacgttcttcttccaatgctaaagttacccctagaattggtgaagcaatatatgggtgagtgttaaagaattccaaatgacgcttcaaagcagcggcacggtcttcttttgttttgtataattttttgattgctggaatcattgagaatgcccaaccaccattttgcatacgttcatagttccatgaaccttgaatgaaggtagagcgccatgctacggctaaacgatcttttttacttaattgaattttttctgccatttttttctcctccttcgattctaatagtcattcaagatatcgcctagagggtcgccagtgttgctgccgccgcctccatttgatgatccgcccattttggtgatgttcaagtaaatcaatgcaatagctactgccaatgcaccgatcgcaatcaatgtcaattcagaaatcgctgcaatcacaaaaccaatgatgaagaatggccatacttcacgagttgccatcatgttgataaccattgcgtaacctacggcaacaaccataccaccaccgatagccataccatctgttaaccaagctggcatagattctaggaagttttgaacagttgcagctggaattgctagcaatgctgctgctggaatcgcaatacggatcccttgcatacatacggcaatcacatgccacatttcgattttgcggatattaccttcttcagcagctgcatccataaagtgaacgattggtacagctaatgtacgtacgatcattgttaagaacaaaccagctacagccaaaggaatcgcaacggcaatggctgtgtcaacaccgccacgtccttgtccacctaaaactaaaataattgcagatgcaacagatgccaatgcagcatccggtgcgacagcggcaccaatgtttgcccaacctaacgcgatcatttgtaatgatccacctaaaataatacatgcttctaagttaccggtcactagaccgatcaatgtacatgccactagcggttgatggaattggaattcatccaagatcccttccataccagctaaaaaggcaacgactactactaataccatagatataatagacatgatagacctcctatttagttgtatactttttacttgttcgacaattcgtttttcgctttacgcaaaatttcatccatgttgtcgcgtgaatcgtttggtactttacgcacatcaaatttgatgccccgtgattttagttcttcgaacgtttcaacgtcttcagtacccatagacaatactttacttacaacaacttttccgactgagtgagccattgaaccaacgttgacttcttgaatgtctacgccgccttctactactcgcaatacatcttctggattttcaaacaatagcaatgctttcgtattaccaaaacgagggtcttttgacacttcgatcattttttctactggaataacattggcttttactcctggaggagctgcttgttcgatcaattttttacgcaagtcgtcttttgcaactgcatctgatactacgatgatccgtgatggattcactgattttgtccatgctgtagctacttgtccgtgaagcaaacgagagtcaacacgagccaatacaattttgatcttgccatcgcccagtacagtacctggaggaagtgatcctttaggttgatcgtcagccacaactggagcagcagcttctgccggttcaagttcttctggtttcaccttgaccccttctttagctgtttcaatgatatgtgcagcaatctcatgtgctgtattcattgaaaaacgtgaagcgtaagcctcgatgaccattggtaaattcataccagctacgattgcccatttgtctttgtggtcttcaaacaagctgtttgcttggttgaaaggtgtaccgccccaaagatcaactaagaataacacttcttcttgatcgtcgaatgtggcgattgcttcttgcatttttgctttgatatcatctgggccttcacttggcatcaatgttacagctttaacattttcttgttcgccgaaaatcattgaaccagattgcaaaatgccgtttgcaaattctccatgacttgctaggataattcctaccatctttttacctcctatttcaaaattgataaatgtgacacttaaatgaaagaaaaaaagcaacgacgaaaaatcaagtgtgactaccctctttttccaaaatatccatcaaatagattttacgatcagcaggaacttttcgaatctcgacttcaatgccctgtttctgcaaataaagcagtgattcgaggtcttgatcattgacagaaacaaaattagtgatcatccgctttcctatcgaaaagctcattcctccaatattgattgaatgaatcggtaatccgcctttgactagtgtgacaacatcttgaggattggtaaataataacatgactttttgggtatcaaataatgcgttatgtgcaacctcaagcattttcgccactgtgacgacattggatttgattcctggcggagcggcttctttcaaaagaaatttgcgaagctgatcatttgcgacttcgtcactgacaacgatgattcggttaataccagtcattttcgaccaggctgttgctacttgaccatgaatcaaacgatcatcgattcgagcaagacgtatatccattcccatcgtaaaaacctcctacatccatcgatccgctggctatttgtggatcccttacttttttcattcacctcctgtatccacttatatagaagcaagaagcgtgccaacttttatacaatacactaatctttggaaaggcttaagaatcggcctcttgatgatacactaaaaaagatacactgaaaaaaagtgtatcttttttagtgtattctattcttaatgtattattgatcagccaaaaccgttttttcttgatgatttttaatcaactctgctaagtaatattcttcgctttctggtatttctacatttaacaagcgcgagaacgagcgaacatggatgtgaagttttttgtacatcggctcttgcttcagttcagaaacaaggggttcatcgacagttaaaggttgctttaatacgatccgttcgatcattccagcagagtggagcacaaaattgatttgaaaccctggtattgcatccgtcaattctaaatcattgatcaattgatggccaaattgccacaatggctcgataacttttcgcggattgacaaaagtcaggttttgctccatatatttaaaacaaatttcttctgcttgttcttcaccaagttcaacgtcttgttcaaaactcagatcattctctaacaaaatttcttccaacaattgatctacatcttgatcaatgaatcgttccagagaaataaaaggcgcatcgatttttggatctatgatccctgtcgtggcgatcagttgatattgtctttgtatgggttctaactcagtctttaaatcagccactgaaagtgtcacaacctctacattctgattttgacgtttcgagagggaactttgaattagttctttgatcctctgagccgttcctttacccgaggcacagatggctaagatggctttgcgatgatgattgcttaagtgaccctccggctgttcaacggaaccatagccgcgaaattttctaagcgattcatacaaactatcgatgtccgtgccgataactgaggcttttcggactgtttccaaaacgattgatgtcgtcaccatatcgacagtccgtacaatcacacctgtttccctctgaatctcattgttgaaggtagctaaagatcccatatctactaataaaatcacgccgctaccatcattaactgcttgaacactttcttcgatctttttcaatgcaacggtaggcggcatgtccaaaggcatgtctactgctgccacttgatccacttctaaaagttgttgaaccacttgaaccatactgcttgccgtgctgttcccatgggctgctacaactacaccaatttttccagaggaatgggcagtccgcaaagatacgagtaaaacagccaaataataggtttcactttcaggaatcgatactttgaaactatcaccaataaatgtacgaatttctttagcaacttcaaactctttcggatagtcggcgaccatttgacgaatattgtcattggtatgccgttcttctcccagatgaatttttttcaaaaaagaactaatgtgtaagctcatcgcatacacaaaattttgctgaaattcatagttcagccttgtgcgtaccagatcataaatacgatttgtcactgtgatcactttttgatccacaaactcgctcaatttgttttctgaattgaaagaaaagccgtgatctttgtaaaatgatttcaaatgaacattgatatctgtagatatgaaatgattgatggcttcttgatccagcccatccgcttttaataaagcagctttatcgccgataatatcgtaaagattatacggtaattcataagaatcggattgaatattattaagattttggtttggttgaacacgcacagtcggctcaagaattttggacagctctgctaactcatctcggcgattccccaagaccattaatcctgagcggattccttcgggaagttcgtccaaatcaatctcgatttcatcttgttgcatatgattcaagaaccctcgtgcacagaccaactgaacgttggacttcaattgaccaatatttccgaagctgacactgccaatcaacgctttaacgacatcttcagtcaatgtgatcgtgcgttggattcgtgttgcttcttgtcctacaagtacccgaacaagatccactttttctgaggcaggtcgtttttcaaaaaacggcagttggatattgatcggaattctccgagtaaaagtgtccaacaatgtcgaattgggatcctcagtagttgctccgacgatgcgaacattggcttgatgatttttaccagtctcacctaatcgactaaaggttccatgatccataaagtaaaaaatcatttcttgtccttcaggcggcaatcgatgtatttcatctagaaatagcatactttcatccgcctgatcaatgattccggttttctcctgatccgctccggtaaaagcaccgcgaacataaccgaacaaatggctcataagcaactctggattattggcataatcggcacagttgaaaacgatcaactctttttcctcttcgatcacctgattgcttttcgcaaactgaaacatggcgtgagcaaaatacgtcttccctgaacctgttggtccagtgatcaaacaatttagccccttaggaggatacagaattgccgctttggcttgttcgacagcatttttcatgctgccgttcacaccaatgatcgttgaaaaaatatcacggtttcccaatttgacatccactcgctgcggcgtagctttctctctttgggggcggttctctttataacttggaacatatttctcaggcccagaccgtgcatcttgagctacccaatacctcactggccgggtatcactcttttgaacgcggccttctttgacaagttgattcaaatctttgctggcattgcttcgttggatcatcaattgatcagcgacctctgatgtcgtcgttcccttttcattcaagccattttctgtattttccaataaaaattgataaatacgctcaatccgtttccccaacagctccgcctccttgaaagttttatccttgaatactttaatgggtttgaataaaaattgcaaatcttttctgaatactttccctactcaaaccagccaataacctagccacccttaaacacgccccttgaaaaatcttgcagcatacagcactaaccattttttcatagcaccttttgattaacttaagaataaagcatttagcaaaaaaaagacaatctaatgctatgattattgtgtcaatgggtagggaataaattttggcacgtcaccaacaaactgctgcaactctttttgcatccataaaacatcgtgccactgctcaaacttatagccaatttgtgggaaatatgcaacttctttgtaaccaaatttttgatggaacctcacactgctttcattcccagccgtgatacaagcggtcaaatttacgatattttgttttttcaactctgactccaaatgatgataaagcatcgttcctatcccttttgcttttacttctcgatcgatgtaaaccgtcacttccgccgtccagtcataggcagctcgtgttttgtaagcggtggcataagcatagccaagaatgacaccattttcttcagcaatcaagtatggataatgctgaagcgtttgagtgatccggtgcgcaaactcttcctcagttggtatctctgtttcaaaagtaatagccgtatgatctacataaggcgcataaatttttaacaatgatttggtatctgcaacagcagcctttcgaatgttcatatattcccttctttcttcaaatttttatcagtatacctttctaataaaaaaaagacaatccttgtctaaaaacaaggatcatctttacccactagcttacgcttgatttttttcttgcccgcaaaacacagtaatatgttgtggtaatacttggatctcaaccggcagacttggaccagggtctccatcgacattggtttcgatcgttgtatcatccagtagtttgatctgcgctttctcaaacgttagatatccaagggattcgttggattccgttactccttttagcagttcgggaatactcttgatggtttcccaaagattgctgtctttaatgtagataagatgcaatttcccatcattcgtactcgcttctggtaacagcgattcaaaaccaccgatcgtattcgacgatcctacgatcagtgtgctgctttcaattttggtttctgttgcttcctgaccactagtgataatttcaaattgatgactttcatttttgcgtacttcccgcaacccggaaaggaaataagccatttttccaagtttcgttttttcttcaacttcaacattgttgatagctgctggaatgatgccgatcgccactacattcatgaaataatcgtcattgattttcccaatgtcgattttgcgagaatgattcaacgaaaatgattcgattgcttcttcaggatcaagaggaatggccaatgcacgagccaaatcattgactgtacctagagggaaaaagccaaaacgcggacgctcctcatgactagcaattccgctgatcgcctcattaactgtaccatcacctcccattgcaaacacgctatccacggagccgacagcttcagatgcgaaccgctcggcatcacccgctttttctgtgtgtgcaacagccacttcatcaaatagttcctgcaatttttttgttgctaattcctcgtatcctgcagctttttcgcctcccgaactaggattgacgatcaatagtgctttcatctcctctgcctccttaatgctacttcgtttcacattttagtataacaaagagccaccagatttgtcttttgtgcaaaccaccgcgaataactctgaccgaatctccaattgaatcgaatagagctgtgtgtaattgccctatttcttattcttagaccaatcgtttgcgtaaacgccccgaaataaaatcaatacaggtaactgtcaaaataataccaagcaaaatgatgcccacacgactccaagatcgtgcattgatagcaaaaatcatcggtgtaccaatccctcctgctcccactattcccagaatcgatgcagagcgaacagctaattcaaaacgatataaagtaaacgacaaaaactctggaatcaactgcggtaaagtcgcaaatcctaaaaccgcccagcgatttccgccagcactcacaacagattcagaaggtccctgatccatattttcgatcgcttcactatataacttggccaacatacctatggaatggacactgacggctaaaacgcccgcaaaagatcctggaccaacagttttaataaacatgatggctagaacaatctcaggaaacgtgcgaatcgctgttaagacgacttttcctgtgcccgacaagaatctaggtgtatttttgcttcgagctgcccaaaacgcaaaaggaatacttaataaagaagaaataaatgtaccaacaaaagcgatggctaccgtttcaatcattaaactgaacaaatcttcgccatccccggtatagacataactccaatccggatggatcaatccgtagaaaattgcccctaagatttgaccaacgttttctttgatagtagctaaggggattcctgcaaatgcccaaatataaatagcaaccagaacgagcacgaaaagccattttctttttttctggggttccgttggcaacatcatagcaatcgctcccttactctattactgatggtatctataagaagaacaacgataaaaatcgccaaaacgataattgccgtttggtcgtagcgaaattgactcaatgatcgttgcaaaaagacaccgattcctcccgcgccgatataccctaagatcgttgaggcgcgaacattgatttcaaaggcatacaaaagataacttaaaaaatgactcgttacctgcggaagtaccgcgtaacggataatcgccagttttgatccccctgaagcggtgacagcctcgatcggtcccgcttcaattgtttcgatcgactcataaaataatttcgtaatcatcccaaaagaaaagatggaaattgaagtcacaccagctaccggaccaataccgacaactgctacgaacagcgccgccaacatcaaatcaggaatcgttcgtacgatattcaaaagaaagcgaaaaatccccgataaccaaggaattgttaggatatttctggctgccagcaaagaaaaaggcaaagcaatgagcgccccaaacgttgttccgacaattgccatttgaatggtttgaagaagaggctccacaatgatcgtactatacgaccaatctggtcgcagcatttttatcagtatcacgttcatttgatccgcattttcaaaaaaacggcgaagatcgactcccgtaatcgatccactcaaaatcaagacgagcaaaaaaagcaccaaccaaagaatattcttccatagtccgcttcgtttaggcaacaattgagtggtcatttttctgtgcctccttgctcttcgataatctcactgccgtagatttcttttaattttcggtcagtggcttcgctaactggtccatcaaaaacaaggcaaccatcacgtaacccaatgatccgtgtaccatactctcgcgctaattgcacggaatgcaaattgacaacgatcgtaatacctaactcttgattgatccgctttaaatcactcatgaccttctccgttgtcataggatccagagaagctaccggctcatccgctaaaatgatttttggttcctgagtcaatgcccgtgcaatcgagacccgttgttgctgcccaccagacaattgatcggctcttgaataaactttttcggctagattcactctttgtagcgattgataagctagttccttatccgcttgtggaaacaatcccaaaagcatctgaagagtggggtgataagcgactcttccagtgagaacattccttaagacactcgaacgttttaccaaattgaagctttggaaaatcatgccaatgtctcggcgaatcaaacgtaattctttgccctttgcctttgtaatggagcgattatcgatcaaaatttcgccactggtgatttcgtgcaagcggttgatggaacgcagcatggttgatttccccgcaccagacaacccaacaacgatcacaaactccccttgatcgatgtcaatattcaaatcttttaaccccagcacaccgtttggatattcttttgtcacatttctaaacgaaatgatctttttatttgctaacgccatggttctcctactttctctcattaaactacttttataaaattgaaaagggtatctgttgatacgataccctttctctgccgcttattgtcctacttgttctgcatattcacgaacgatatcaaaattactgtcttgggagactacatagccttcatgagagtagatatctgaaatgatttgatgaccttcttcatctttaccaatttcgataaaggcatcttggatttttttgtcccattcctcactcatatcactgcgaacactaatggtgtcattcgggattggttctgtgaaatacataggttccacgtcattcatgattttaggataatcttttttcactgtatttcgcgcatcttcaaaaacgaaagccgcatctacatctccgttcaagacagccaaaactgcttggtcatgacctttgacttgaactgtcgttacatctttattgatgtctatcccttctttttgaagttccgcaactggccaaacatacccagccgaagaggttacatcttgtgtagcgatcgttttccctttcaaatcagctaattccttgatatcgctgccgctcttgaccacaaccattgatcgatagctatccaccaattcatctgtcgcttcaccaccaggctgcttgattccatatcgctgtgcctgcagtaatacttttacattgctttgttcatgagccaaaacataagcatttggaggcaaaaagcccacatccacttgcttagaagccattgcttcgacgatcgtattgtaatctgttgaaacacttacggtaactggaattcctaatttatcacttagcagcttttcaagcggtttcgctttagcctctaacgtttctgctgcttgcgagggcacaaattgaactgtcaacttttctggaacatattgttcctctgcactcgaactagattctcccgctccgcaagctgctaatgccaatccagttgctaaccctaatccaacgattcctacctttttccaaagcttcattcttcttctcctttgtgttaaaaatcagaacaaccaattaacgaactttacctttttgattatagaaaaacgtacatttaattacaactattttttcactataaatggatattttttagtaaaatcaatctaatcacgaacattaacttgtgtaccttttctcaatcaaagagtatttcacagtctgtcaattgctttgctctactttaaaaagagtaccaaagcaatttattgtttgtatttacaacacgtaaagtttctgttaatcctctcgaagatagttgtgatctattggacatgtcatcaatcaggaaattctctacttttgaggctataattctctcttcacatctaccggtaactagtttgaccaagattaccaaaacaaaagtttgaagagacagatcgaaaagacgatcgcctattcttccccggacttacaacagcagtctttcaagtgcaaaaaaactcatggctgtcggctcctcacatccaacaccaccatgagtttattttcaaccagattatctccattctttcaacaacacggtctcatcatttacaaactctccagttgcaacaaatccaaaaccttcgtacatttgtttagcgatcgtattttctttaacggaagaaattcgtagttcttttgcttggatcgcctgccggaaccattcaatcgctgcttccattgcctgtgatccatatcctttttgctgaaagcgatgatcaatcataaaacgctcgatccaccatgattcttttgcataatcttcatccgcttcgtaataactaaacaataagaaaccgatcatttcttcttgatgataaatcgcaaaagcctgccgagcttcttcatatacagcttccagcaaagaataccaattaggcgcaacaaatttttcttgttctttggttgtttttagttcaatacagccacgataattctcttttgtgattggttttagccggatcatttcagacctcctctaattaaatcgctttcaaacaaaccgaataaaaaaagatgacttactaaggatatagtaaatcatctaactgtattattaagcttcttgcgctactgggtatacagaaacttgctttttgtcgcggcctttacgttcgaaacgaacaacaccgtcaacttttgcaaataatgtatcatctccaccgatacctacgtttactcctgggtaaattttagtaccgcgttggcgataaaggattgatccacctgaaacagtttgaccatcagcacgtttagcacctaaacgttttgattgagagtcgcgtccgttagaagtagaaccgccaccttttttgtgagcgaagaattgcaaattcattttcatcaacatgagatgcacctcctagttttctttgattgttttaatttggatataatcgctgtattcttcttgaacagattgcagaccaatcaatagattctctaaaagaatctgagagatattcgactgctcttgggtcaaacgaggaacaagtttaacaagaaggtagccaccttcttcattgttcgcttcaacgattggtgttacaccagccaaagcatcgatcccatttaccgcactgatcgctaatgctgaagcagctgcgcagacgatgtctttgccatattctcctgcttgcgcgtgaccggtaagttcaaaagaaacaatccgaccagagtcattacgcttgaatgtccctttgatcatattcgttaccctacttttcgtaagaattatgcattgattgcgtcaataacaacttttgtgtaaggttgacggtgaccttgtttgcggtgtgaatgttttttaggtttgtatttgaaagttacgactttcttttgtttgccgtgtttttctacagttccttcaacagttgcaccagcaatgattggggcacctacttttgttgattcgccacctactaagatcacttcatcaaaagtaactttttgtccagcttctacatctaatttttcaacatagattgcttgacccacttcaacttttacttgtttaccaccagttttgataattgcgtacatgctctaaagcacctccttctattatacttagactcgccatcccaagtgactttcgtacttaataacttgttctgtgcggttgtagctgtggagtccacaattacaacagattaactttatcaaaatgtttccgtaaagtcaatgaaaaataatgatttatttttgtcatgccgctttactattttttttaagtaagttgttttactatagaagaaagaaacaaatgaggtgttaaaatgaactacccaaaaaaactagctgagccaatcattgaacaatcaaaagcctatcagcttgaagggtttgttcctggtcaaggaccgcttcatcccaaattaatgatcgttggtgaagcacctggacggaccgaaatcgagaattttattcctttcagtggccaagcaggcaaagaactgatggcctctttggcgttagtcggactgacacgtgaagaggtatatatcacgagtgcagtacggagccgtccctattcgatcaaagaacgaatcaacaaacgaagtggcgcacatgaagtagtgcaccccaatcgaacgccaacaaaaaaagaagtcttgttgcatgcgcctttattggattacgaaatccaaaaggtggatccgcctttgattgctacggttggaaacatcgggttacaaagattattaggcaatcgctattccattacaaatgttcatgggcagccaatcagaagtgcgatccaacagttgaatgctgaaaaaaatggttatacgtggtctgacaaacaatacctgattgttccaatgtatcatcccgctgccattttttataatcgaacattggctgaacggatccatcaagattggtctggcttgaatcgcatcagagagcatggcttgcactagcatctcgcaattctgtcttttagttgcggcgataatgagggattgttttttcataagcagtgattttttcttcttcttgcaacgtgatgccaatctcatctaatccattgaccagtttatgcttccatgttgcatcgatctcaaaaggatagaccgtttgtttgacagttacgtgctgtttgggaagatcaatagcgatcctctcatcaggagccaatgctgccaatacttgacgagcagaaagcgataaaacgataggcagcaagccgtttttcgttgcattcatataaaaaatatcgctaaaactgccggcaatcactgcacgaaagccgtagtccatcagcgcccaagccgcatgttcacgcgaagaaccagaaccaaaattatctccagaaatgaggatagatgcttctttgtattctggaaagttcaaaataaattcaggatttgaacggcgatttggtaaatagcgccagtcatcaaaaaggtattgaccaaatcctgtcttttcaacccgttttaaataatttttcggtaaaatttgatccgtatcaatattatcattcattaatgggatcgttttcccttgatagtaagtgaaggcttccattaatttttcctcccgacgatttctcgaacatctacaaagcgtccataaacagcggcagccgcagccattgctggactgcataaatgggtacgggcattcttaccttgacgtccaacgaagttccgatttgatgtagaagcacaatggacgcccgctggtactttatctggattcatgcctaggcacatggaacaaccaggctctcgccattcgaaacctgcatctttaaagatctgatctaaccccagtttttctgccgcttttctaactggacgtgatcctggaaccacgatgcctgtgaccccatctttgattttttttccttccaaaatagttgcggcttcttgcaagtcagagagtcgaccatttgtgcaggaaccgataaaaatatattcaattggaatatcttcggctcgctgtccagggtgcaatgccatatattgataagcttgttcatcattatggtcacgaatttcaggaaagactccactgataggcactcccatctcaggattggttccccacgtaatataaggttccagctgagaggcatcaagagtcagttgggtatcaaaaacagcctcttcgtcggtttttagcgtttgccagtctgcaattgcgtcagcgagctctttgggtgcatattcccgacccgcgacataagcaaaggttgtttcatcaggggcaatcagccctatcttcgccccaccttcaatcgacatattacaaatcgtcatgcgctcctccattgacagattccggattgtttctccataaaattcaatggcatgacctactccaaaatccgtaccgtgagtggcgatcagggcaagaatgatatctttagcgtagacgcctggttgcaaagttcccttgatctcaatccccatacgttttggtttcgtttgccaaatcgtttgagttgcaaaaacatgctccacctcacttgtgccaataccaaaagcgatagctccaaacgcgccatgtgtggctgtatgtgagtctccacaaacgatcgtcttccccggttgtgtcagaccggtttccgggccaaccatgtgtacgattccttgtcgggctgagccattgtcacataactgtatcccaaatgcttggcagttgttgcgcagtgtatctatctgtttctttgcaaccaaatccgtgatcgtaaaaatatctttagtcgggacattgtggtccatcgttgcaaaggtcttttcagggcaacgaacacgccggccagcttgcctcagtccttcaaaagcttgaggagaagtcacttcatggatcagatgcagatcgatatataacagctgtgcctcaccttcttccagcactacatgacgttcccagagtttgtcaaataatgttttccccattcagtagccccctaattttttgattaccgcattcgtaaattctgttgtagtagtattccctccaagatcacaagtcacgaccccatcttccatcacttgatagcacgcctgctccatctgatcagcaattgatttcatcccaaaagaagttagcatcatccccacagacagaatcattgaaatgggattagcaatatctttgccggcaatatccggtgctgaaccgtgaatcggttcatacagtgaaaccccagaaagactatgacttgcactagccaaaacacctaatgatcctggtaggactgacgcctcatcgctgagaatatcgccaaaaagattttcagtcacaatcacatcgaatacagttggctgttgcaagatcttcatagcggcagaatcaacatattgatgtgttaactgacaatcgggaaattcttgcgctacttcattcgccacctttcgccataatttgcttgttgccaaaacattggccttgtccacggacactactcgccgttgtctagttcgtgcgatctgaaacgcctttcgtaagatacggcgaatctcttccctatggtaataattcagatccgaagcctctgttgccgatagctttttttctccaaaataaatgccgctcgtcaattctcttaccagtaccagatcggttcctttaacgatctgctctttcaaaggagaaaagggtaaaaaagcatccgttactttgatggggcgaatgttggcataaagatcaagcgcgcgccgcaagtccaataaacctttttccagtgtataagctgcattttcccacttgggatccccaatggctccgagcaaaatggcatccgcttgctgacaagcttgcaatgttttttttggcagtggtgtgccatactgctcaatggcttgtccgccaaatgcataagactcaaaagagaaatacgggttgcttggcaaacacgcctttacaatttgcaatgcactggtcatgatctccggtccgatgccatcaccagcaagaacgacgattttcttcatttattctcgcctcgattcttcaaagcagcgctggcttgtacataggcttttgcagaagcttgcaacacatcaaaatcaacaccgatcccactgatttgtcggtttgtctctgcgcattcgatagctacatgaacttctgcttgcgcatcttctccactcgtaagagccgtgatttcataatttagcagtcgcggttgctgatcaaaaatctggtcgatcgaattatagattgcttgaatgctcccagcgccaattgctgaggcaacataagattgatgatcttttgtgatcgataccacggcaccttgatgaccattggagacatattgtagctgaacagcctctaattcaacgccctctgtttgcgtgcgaccttgatccgctgctaacgccagcaaatcctgctccgttacttgtttctttttgtctgccagttctttgaatcgtttgaacaatgcatttgtttcctcagagtcaaactgatagcctaattgattcatcttttctataaacgcatgccgaccagataattttcccagcggtagcgaatttgtttgaacaccgactaattgcggcgtaatgatctcgtatgtctcaggattcttcaagacgccgtcttgatggatgcccgattcatgtgcataggcgtttcctccaacgatcgctttattcttaggaacagcgatccctgatagtcgagcgactaggtcactggttcgtttggtttcgcctaactggatattcgttgtgcagtcatagaaatcttgacgcacatgcaatgctaatgccacctcttccaacgccgtgtttccggcccgttcaccaatgccattgatcgttccttccacacgagtggctccgttctcaatagctgccagagcattcgccgttgccattcccagatcatcgtgacagtgggaggaaaacataatcggttccttgcttttggtattggcaatcaaataggcaaataattcgccataggcagtgggattactatagccaacggtatctggaatattgatgatggtcgccccggcatcgatcgctgtttgaaccgcttctaacagaaaatctttttctgtgcgggtcgcatcttctggagaaaattgaaccttgtcaaataaggttctagcataggtaacatgttctttgattgctcggattacttcttctttagtcatggctaatttataacggcgatggacttcactggttgccaaaaacacatggatctggggacttactgcttgctttaatgcctcataagcgcgatcaatatctttaatttgacagcgtgccagacctgccactgtcatcgtggatacagcagttgcgattgcttgaaccgctgcaaagtctccttccgaagcaattggaaaacctgcctcaattgtatcaattccccatttttccagctgtaaagcaagctgtaccttttctttcgtattgaaattcactcctggagtctgttctccatctcgaagggtggtgtcaaaaaactggatctgtctcaaactgattcctcctctggctcatttgttcttttagggtataaaaaaagcactccataaaggtcttccctttatgcaatgcgaataggactcttctgtttcacgtcatcagatcatgaaatacaaaaaagagtcctcacggtaataataagttgctagtgttcatcggcctatttctattcattttattcacctgtcactttctgcttctcgttaccttatataagaagataccgaaagacactgcatctgtcaatgcttttaattgaattttctgaatatttagatagataatattagagaaaaagaaataaaagtgtccttttctctcttcatatctcttagaagtaagaaattattttgaaatacgttcctttaaaacagatttttttcagcgaatactggttatatcttcacagactcttaacacaatttaaacattgctctgttagtatcattgtataccaaaaattatttttcaacctttctcccctaccagtcattcgactggtttttttgtcttactgagcaaaagatctgttcttttcccaagtagaaaggattgaactcaaagagagttatccgtataataagtaacagaaattatttaggaggatcaggatgcgtaacgaaatgatgcatcgtccagtagtaaaaaaagaactagtggcgtttatgcgggaaaaacaaaagcaattaactgggaaattaggtcaaatcgaacaggcagctcatgaaaaagaagttcctattattccgcatgagacagtggtgttcctgcaatttttattaggacaaatgaagcccaagcaaatattagaaatcggtacagcaatcggcttttcttcaagtttgatggcacagtatgtaggtgatggtcacgtaactaccatcgatcgctatgatgtcatgatcaaaaaagccagagaaacttacaaacaattgggccttgaggataaagtcactcttttagagggacaggcagcagacgttttgccgacacttgatggcccttacgattttattttcatggatagtgcaaagtctaaatacatcgaatttttaccggaatgcttacgacttttacgtaaaggcggcgtgttaatggtcgatgacgtctttcaggcaggaacgattttagatcctatagaagacattccacgaggacaacgggccatccaccgtaaactaaaccttttcctcaatacagtgatggatcatccccaactgacttctagcttaattcccttaggagatggcgttatccttattacgaaagaagcagatcatgtggacgtggctacaaccagcgagtaacgagtcattttaaagaaagttggcaaaaatagcgaaaagcgattgacattaggcgctcctttttctataatgttatttgttgctgacttgtcatagtagctcagctggatagagcatccgccttctaagcggacggtcgggggttcgaatccctcctgtgacgttatttaaccgtcgagaacccttgttcttggcggtttttgtttgttcttgtgccaaatgtgtgccaaattgatttagtttttttgaaattaggctaactagaaagttgaattatatatataagcgccaaataagttatagattctttacctctttttctgatacaattaagaaaaaagaagaggagtttataacgaacatgaaaaaagtttatttgggtgtttttattggtatcaatttattattcttatcggcttgctcaagtcccgaagataagaaaacagttactcaaggttctgccactgctcaaaccgaatcaattgttgaatcttctgctgaaaatactactgaaagtagcaccgtagaaagcaatagtgccaccgtggaccgtgccgaatattcagcgaatttttcagaagattggaatggcctgaccacgaacatcaataaagtagtgattgtagaactatccgatgatgagattgaaatgcaaggtctagaaaataaatacgctgttcaagtatatttcgaaattaccaacaattcggacatggattttgatacttatccagaccaagcaacaatggttgtggaaggtcagcaaatcgaagctgagatgtttttaagtgatagtattggtggagaaatcttaagcggtgtaacaaaagaaggaattgtgacattttcagtacctaaaatagaagatgttagcaacgtttctaatattcgattgaaatggtctgctagctacgacaccgaaaattatgacgaggataattataaagattttgatgttacattcgatttaactaaataatcgatgagtggcagaacttatactaaggttgtttgatatgaataaaatcattaaaattgctcctaccttatttggtagagagctttttttattttctgttcgctttacaaaacgaacgtaagttcgtatactttccgtaaggagtgagctattatgggaagttttcgatacgaacttgagcccaaacgtgacattctttttattgatgtaaaatcattttatgcttcagttgaatgtgttcaacgtggatttcacccaatgaagaccatgttggttgtcatgtcccaatctgataatacaggaaacggactggttcttgctgcttctccattggcaaaaaagaaattgggaatctcaaacgttactcgtgctgataatttaccgaaccatccgctcctattcaaggtccctccacgcatgaacttatatataaaagaaaatctgaaagtaaacaatgtatttagaaaatatgtagccgatgaggatctactcctctactctattgatgaatcaatgatggacgtaactaaatcgctgaacttgtttgtgccagacaaaagcttgtctcgaagcgaaagacgatggcgactagctaagatgattcaacgtgatgtctatgacacgacaaagctatacgtgacggttgggattggagacaatcctcttttggccaaactagcattagacaacgaatcgaagcataataaatcacttattgcggaatggacctatcaagacgtggaaagcaaggtttggaacatctctcctatcacagaattttggggcattggatcacgcacacaaaaacgacttgagcgaatgggtatagaaacgattgagcaacttgcgaaggctaatcctgatttgttgcgaagtcgaatgggaattattggtgagcagttatatcatcacgctaatggaattgatcgaacaataatctctgagccagctcctcagacgagagacaagagttatggtaatagccaagtactaaacagaaattattatctccaagatgaaatcgagattgttgttaaagagatggctgaacaggttgctgcacgtattcgtagacatcactgccaaacttcttgtgtttccatttacattggtgttgcttttggagaaacacaaaaagggttctcacgacagatgacggtcccacctactgataacacaaagaagctagttgaacattgcctttttttatttcgtaaatattatactggtcaagtcgtccgtcatgtaggtatcacctattcaaagttaatttacacatcaagtattcagcttgatttatttgctgatgctgaggagcagataaagcagattaaactggataaaatcatcgataaaatacgtgaaaagtacggatttacttctagttttgataacttctcattttttgttaacccatcaccaatatctaaataatgtaaaattccttgttgttttttcgatgtatctttaaccaaaataactattgttactcccgtcatgatatcaaaaatatttcctccttcaatttttgattgttctttagttttccctctaatggctccttttaggttcaaaatataaatagcagaaaattcgtctatcaaagatttacgcattccatccatggcatttccatctataaatgaattattagtaatgaaaccaataaccccattttctttgatttggttgctagcccaacgaattgcacgaatatacgaatcaattatccagaaggataaaactcatgaacttccttaattgaaattacttaggtgaacccgtattcaaaaaacgttgttttaccgctaaggacccttggccttagcggtttttgttttgctttgtgcccaatataaatcaaagatgcactctttgttcaaccaaaaagtgcatcttatcaaactagcaagttcttttattttttcatctcacgaatgtccgagttatcacgaaaaaactgtaacacacggattcataaatcaattatctaaagacgttggtcattgctgctagtcatcaatcatcttctgtcgtatttcttagcaataaaaaccaacttctctttcgatcacgtcatccaagcgatacgtacgctaccgttgttctctgaaagttatttaccgattaattagcaacgtgtatttgctgttgttcaactaacggataactaatcagtttttcactgtctaggtcttctttatgcatatctacggcgacgatttgactattttcataggtccgatagtaataaatccctttgtcgacattgcagcaagaagaataaatggtatattcatatttcccgtctcccacatcacataatcctttttgctgttcgacagaccctaaaatatggaaaaattggctgatactttctgattctgaatcaccagatacagaattcagttttgtgaatgcagccttcacaaatcgagacatcgaggacaaatccccaggcaacccaattccgcccattcctcgactatactcattcaattcgattgcatctgagaaggtattggttggcgttttactagataaagaacgatagttatttaaattaaacaaatgatagtcaaaagaaggattgttcgttaggacaccaacaggattatcatagatatgaagtccgtctttcatactttctacaacgattgaagactctttatccgctaataaccagtgtaaaggcgacagcggaagattttcgctaaaattgatattaaccaaattgattttattcaacaattcttttgcttcagctactgtgctgcattgccctaatatccagggaatgaattcaaatggtgtgacattgtctttattctcaaccggttctttgtaatctgcaaaaccagcaaaatttaacccagccatgcttaaacctttttcattggtagcatcataatacagcggataatccgctataccagcagcaatcccgatcatcgcataatgctgtgataactcaccaacttttcgaaaagacagcttatagttcctaggagtaatcgtgactacttcttcataagacagctcataatcaaagtttctaccaaaatagtgatctcgcgttgaataagtaattgatgtacacatattttttcctcctaatgttctttttttcacttatattttactcctattcacttttttttcaaaagaaatgattgtgtctcgaactcagttcttttattggttataatcatctctaggaaaatgaacgttaacaagtactctattcgtacttttcaataaaacttatcgttgttacactagatttcatacctatcgtaaaaaagcattaattatcaaaaaaccttccaataaaagatgtattctacatacaaggaggcagtgaggtgattatggattatacaaaagacattcaactggcattactctacattgaaaataatttgactggcgatctctcctcaaaagaaattgcaaaaaaagccggcatgtcagaatttcattttcagcgtgtatttaaaaaacaactgggcatgggagtatataaatatcttcaaaaaagacgtatggcccatgcttccctactacttttgaagagcgaattgaagattatcgaaattgctctgatcagcggtttttcctcacaagaggcgttttccagagtttttaagtcctattatcaactccctcctcgacaatatagaatccaatttaaaaacttttttagggggaatcaaaaaatgtgtgagacaaaaataaatggctggttgctttctggaaataattttgacaaatatgaagtgacaattgatcaaatgaattttcatagtggaaatcagtcagtaaaaatgagccaaacagagagcttatacacagagaattttgcaactgttatgcaacaagtgagtgcaaaaaattacattaatcaacgtgtgcgattaagcgcatacctaaaatcagaatcaattgaaggttggggaggaatttggttgagaattgatggcaagaattttgaacaattagcgttcgataatatgcagaatcgtccagtaacaggcacaaatgattggaattattattcttctgtcttagatgtctcacaggaagctgaagttttaaattttgggtttttgttgcagggaaaaggcactttgtgggctgatgatttttgtttagaaatcgttcccaatgatattcaaacaaccgaatttaatagtgaacagtattacccaacggaaccccaaaacttgtcgttttcggaataagaatagttaataaatgagctacagtagaattcaagatgccacaagaccttatggaatactactgtgcttgaaggatccaagcaaaaatcctgctcccctccttttcttatacgaaaaagaaatagcattctgaatcaatgcgaggtaaaataaaagaaaactttttaccaatcagcttattctgaatcggagaggaagctttctatggatacaatgatgaaaagtatcattacagaaaaagatttattacggcagatcctgcttctcgaagagttatccaatcacaaaacgattacggcaaaggcattggctgcttcgattcaaactacagagcggactgtctttacagatattcagtatattcgagagcatttgcctgacggatgggaaatcgaagcgacaagtaatggcttttctttacttaaaaaagattcccaactaaccaatcaattatgggaaagcttcttgccgctttcaattggcgctatgttgatcaaacagttattctttgcaaaaggaatctcaacacaatctttcttgcatgacagtggtatctcttttgaaacattgaaacgtcatgttacaaaaatcaaccgtggcattaaaccatacaatattcgaattcagttgaacgccaagcaagtcaaactgtcaggtagtgagatcagcattcgagttttcttccatcgtctgctgctgccttttacccacaataattatttctttgaagattatgctattcatgaatcacattatcttatctttttacagtcactgaaacgtcaagagttggacgttctttctgaagaaatttttggcacttgctggttcttcatcaatacaatccgaatcaaagccaattgtcgggtcaatgcactcgcttttgatcctttagatccgctttttttacaatatcatcagtcgctccagcaagtttatcaaaaagaaggcgtctatttgaatcaggaggagtgtttctttagtttctattgttttctggaaagttggaattacaacaatcagtggacaagcaaaattgctgtcacactagatgcctatcaggaaatcaaacaatccgtccagcgatttgttcaagaacttgggcaagaattggcgattcccctactttctgaaacccagttagcggacaatttgctgcttttggtcttaaaattcaatgaatccgcaaaactgtctgaacaatttcaattagagtatcaagaaatgatgcacattcgtcaacacaactatcaagcaatttttgaacgattacggaaatttatcttagatccaaaatttgccattgtaaccgatgaacctaagtatatcttgaatatggcttcactcctcgtacaacaagctgtgcttcaggcacgaccagtaacgacccgagctttcttcttctttcaaggagaaccagcatggaaagttttcttgcaacaggaaataagtgattatttgggttctaggatcgaattagtcccagtcgaaccagctgaattcgcagggatgactactcgaaatgacgacttcattatttcgaacgtccctttggatgatcccaaattaccagtcttctatctttcaatgctgccaactaaaaatgagctcaatcaattgactgagctcatccaaacctattatctgatcaaccaatgacttagcttaattcattggttgtttttgtattttgccgattggcgcgccgcttcattagatgcttttcaacttcaaccaccgcaaagagtaagaagccatttactgcgatactaagatgctgtacaagcgtcaatgtagttgtcccaatcagttgctgcgcaactggcaacaccagaaccattccttgcatgatcaccaagattcctagagaaatgaacagtgcccgattttggaacatactcttgttcaatgctggctctaaaagctcccgacaattcaacatgtatactgcttgtcctaatacgatgttctgcaggagaatcgtttgctggactgcttgcccttcaaattgcatggacaaaaagtaagcaggaatcatgatcagtagagaaacatagacgattcggaacatgctgtacatggaaagaattccttcattgactggacgtggcggccgatccatcacatctttactcgctttttcgaatcctagtgcataagacaatgtaattgttgttaccatattgacccagaggatctgaactggagtcaaaggtaatgggcgatttaacaagagagcaaaaatgacaatcaatccttgcgctaatgctgttggcaaaaagaagttgatggtttttttcagattgtcaaagatccgtcgcccttctttgactgcattcgcgattgtatggaagttatcatctgccaaaaccatatcggctgcttgcttgcttacttcacttcctttgatccccatagcgatcccgatatctgcttttttcaaggcgggagcatcattgacaccgtctccggtcatacctacgatctcaccattattttgtagagcggtcacaattcgtagcttgtgctctggcgtcgtccgagcaaaaacatccacgtgattgacttgctgtgccaactcctcatcggtcatttggtcgatatctaatccttcaagaactttcttcgtatgtttcaacccgacttgctcgccgatggcttgcgccgtttctttgtggtctcctgtgatcattttgactctgatccccgcttgtaaggactctctcactgctttgattgcactgtcttttggcggatcaatgattcctgcaagacctatgaagactaaatcagtgacttcttcatgagcaacttgactggatgctggaactgtcttgtatgcgaaccctaagacccgctgtcctttctgtgctagctcagaagccgcttgctgccaataggatacttgatcttctgatagctgacttttatttagcaaaacttctggagcgccttttacatataagattgattgatcctcttgcaaaggatgcaaagttgccatgtacttgtaagtagagctaaaaggaatttttgctgcaacttgttgcaagggtaattcctgagtctccacaaactgcagcagcgcccgctcagtaggattaccttgcaaatctgctgcccgctgagaactatcttgtttcagatcttgacaatttgccatgatatcgtacatgagcgcttgctctttttcggttacagtgacagtatctacaacggtcatttcattttttgtcaacgttcctgttttgtccgaacaaatgactgtcattgcaccaagcgtttccaccgacggcatcgtcatgatgattgcttgctgatctgccatttctttgacacccattgacaaaatcatggttaaaacagctggtaatccttccggaaccattgctacgattaacgcgatcactgaggaaaacaacacgtttagttctagaccataccggaatgcggtaaagaaaattaagaagagaatcagcgcgacaataccgcgaaaaatctgcttgttcaactgatgcattttctttaccaacggtgtctcttgtgatttcactgactgcaaagcttgattgatcttaccgatttctgtctcgtcgccagttgctactaccacaccgatagctgacccactttgaacaagtgtaccagagaagaccatgttcttttgatctccaataatactgttttctgtgatgacgtgttctgttttcttgactggctcagattctccagttaagatcgactcttctacgaccaatccatgattttcgatcaatcgcatatccgctggtacgacatcgcccgccttcaatgagactaaatctccttgaacgatcgactctgcggcaacagtttgctgcagtccttccacaatgactacggcttcttggcccatcatttgttttaagccgtccaaagattcttccgcttttcgttcctgccagtaacccacaatgccgttgatgataacaactagaagaatgatgccactttctacataatcacctgtaacagcctttaaagctgcagcaaccatcaacacgatcatcaacagatccgtaaaatgttttgcgattttttgccaagttttgatttgaactttttctgcaatgcgatttgcaccatctgcttctaaccgtgcctgacgttctttatttgaaagtccctgacgatcggactgtagctgcttcatcaattgttcttttgaaatttgataccacttcattgccattccccctaatgtctttttagctttcgcttgtctataagtataggggggattcttaaaaataaacggtcgattatttcagtctaatatgaaaaaaatgcccattaaaaaaacgctctattagaaagatccatttcctccaccatcaccatgattcgctcttgtgattttttcatgaaacatcgcgatagcctgtgcggtttctgccatatttgcgagcgttacactttttttcattgcttcatcaaggagaagtgggcctggttgaatactgaaaataccagcaaaatactgaccgatctctcctagatcaggctccctttgcccacacaatgcaacaactggaatagcatggggctgtgcgattttggccacacctaatggcacttttccggctgcagtttgacggtcaaaacggccttcaccggtgatgatcaacgtagcatcactgattctagtctctaatttcaacagtttcgcaatggtcataaatcctggacagatctgtccccctagtaagaccatcgcaccgccgatacctccagcagcacccgttccagcgatcccatttaaatcaatttggtattcttgctgcacgaaatacgctactttttttgcttgctgctccaatacctgtaccgtttgaggtaaagcacctttctgaggtccgaaagtagttgcaaatccttcagctccagtataaggattagttacatctgctaaaaccaacagttcgataccagaaagcaatttctgcactgctgttatcgaaaaataatttatggtcaacaaaggattgcgcgcatctgccgcaggttgatacattagttccgcacctaatgcttccagtaaacccagtccgccatctgttgttgcactgccacctaacgttacatagatctgtgctactttttcattgattgcatctgcgatcaaaagacctagcccgtaggaactagcctgtctggttgtttgatctgatggatcaagtaattggataccgatgattgctgcacattcaataatcgctattcgcttttgattgattgttgtcagtaaatacgaaactactcgttcttctcctaggggaccgacacttgttacggatttatactgtcctccataggcagcaaataacgcagccattgttccttctccaccatctgcgatggggattgattctttttcccattgtactggaaaccctttaagtgctgcctgatttaattcttccgaggtagcactccctttaaatgagtcaatcattgctatcactttcatatcgaaccctcacctcgttttctttcattaaacactgaaatacgtcttacaacaagaaaaaagagtgttgctactctttatcaacccatggttaactttatcaatcaaaagttaacttgttctccattgtgctcctctctttcctgttctacaataaagctagccaattcaatggaggtgcgtcatggaattaccaattggacaggaaatagctaagagaagaaaggacaaacaaatcactcaaacagagctagctgattttatgagtgtttctaaggcctcggtttctaaatgggagacgggccaatcttatccagatattaccttgttgccactcctggctgctttctttgattgcagcgtcgatgatcttttagtgatcaattctcagctaacaactcaagaaatcaagcggatttaccagttgttgaaagactcgtttgaaactaaatccgctgatgacatgttacttatgctgagaggattcattcgccgttattattcctgctatccatttctgctgcagatgggacttttttatctgaatcattgggatctgttgcctattccagctcaagttactaggacagaacaagtaccaaataatgagaaaactgttgaggatcaacgaaagtattacttacaagaggcggttaaattatttgaattagtcaaaactaacggttccgctgacctcctgcaacaagctagctattatgaagcctattcaatgcttatgcttggtcaggcagaggacgttttaggtgtattaggaaataagacacccgttttcttgccagtggaatctttgattgcagctgcgcaccaacaaatggcagatggctcagccgcagaaactgttcttcaaagtgccatttatcaatatgtcacagttttactcagtctgttgactaactacacgcttttgctgaccaaaaaaccccaagctatggaagcaacttaccaacgagggctggccttttgtgaaacatttgacttatccagactacatccagtcattatgctcaattttttggctgcctgtttgaccacttttgctgtacaaggcaatagtgcccgcttgctttgcgctttgactcgttatgtctcattgctggaaaaaacagaagatccttatctccttcatggtgatgcgtactttgatcagatcgaaagttggattgatgagttggaacttggaaatcagatgccccgtatttctaatatggtaaaaaaacaattgacagggctgattcttgaatcacccctattgcagcccttcaaagatcaacaatcatttacagaattattccagcgcttgcaagcagtagccgcccatactgcagatgacactcatggaaaggaggaaacacgatgatgaccacgagcattccagaaaatattggtgactatctacccattctgatcccattagcacttttgcaattcgggttgatacttgtttctgttttagatatcgttaaacagaaacactttaaattcggcaaccgcacgttatggatacttgtttcttgtttgattagtattatcggaccaattttgtatttcacttttgggaaaggagaaaaagaatgaacgtcattgagatcaatcaattatctaagtcttttggcgaaagaaaaattctagatgccatttcttttgtcgttcccaaagggagtgttgtcggctttgtcggggaaaatggtgctggtaaaacaacaacgatgaagctgattttaggcttgctaaagtcagatagtgggcagatcacggtctgcgatgagccagttgtctatggaaatgctcaaacaaaccgtaagataggctacttaccggatgttccccaattctattctttcatgaccgcaacagaatacctgaatttttgcggaaaaataagcggtcttggcaaacagctgactagccgaatcgatgagattcttcagctggtcaatcttgaaaaaaacaccaaaaaaatcagcagctactcacgggggatgaggcaacggctgggtcttgcacaagctttattgtcaaaaccagaaatattgatttgtgatgagccgacttctgcgctggacccgctgggacgcaaagcctttctagatcttttacttgccatcaaacaagaaacgacagttcttttttcttcacatattttatcggatgttgaacaaatttcggattacgtggcgattttacatcagggaaagatcaaactctttggtgaaatggaagaattaaagacacaatttcgccaagaagattatcttcttcaatttgccagctcacaagaaacagagcatttctgtcagctcgcgaaaggtgcggcgattaattggacgagggaaaaacatcaactgattattccagaaaatcaaacttttcaacaaggccaaaaagtgctgcaactcatggctgaaaatgaattggtccccttactcttccaaaaaaatgaatcctcgctagaaaaaatctatttggaggtagttaaatgacgcagctaacagtttttttaagaaaagaagtattaggcggctggcggaataaaaagatcatcatttgtggagtgatttttctgatggtgggcatgctctcgccttttctggcaaaaataatgccggatatcttttcttccatggtgacagatgggatccaaatcactgtttccacgccgacatctgtcgattcgtggatgcaattttatggcaatatcggttcattgggtctcttggtttttgtgatactctttgcggatacgatttgtgcggaaattgagcaaggaactctgatcaatctaatcacaaagggattgccaagacaaacgattcttttagcaaaaacactttatctttatttcctttggacacttttctatgctgccgcttttctcatttgtcttctttatacaagaatttatttcaatgactctttgacccatcatcttatcagtgcgggttttagttattggttatttgggctattgtcaatcagcttactgctgttaagctccgcatttgctaaaaatgtttaccaagtcttactctttttagctgctttttatggtattggcgtattgggcagtctctttgaatctctccaaaagatcaatccttattcattgtccagccagacaattgcttatattcaaggaaattcagagctgatggacttcttaccagctgttctgatagctgtagtcggatcgtttttgtcattaatcattagtcgttcgatttttcaaaaaagaaagctttagactaatttgattatttctgggaagtagtaaataacagcctctctgacaattgatgtcagagaggctgttattttgaataagtgatattttttagtcccgacagtaatctcaatctctcttcgcgaacgcgattatcaacaaagggaatcgaagagaggttccctcatccagccgttcttttttctttgacaggagcggatgcaagtgtggactcctttgcttcctttcttttgacaaattgacgctgccctttgagcaagatattcataaagaaagcaatgagatagatcgagcaagcagaaatgatcgcttctctcagtccaaagaccagaaagttcaaaacaatgatcgttgtattggtcaagaagatcccgactgctttttttatgccgaaatatttttcaaaaatcaacggtgggatcgtgactcccccattggatgcaccgatacagtaaagggtaaatatccctaagctaaagaagaagcttcctagaatcaaagaggctgggtaaaattcccaaaccatccattcaggaatccatgctaatatgacaggaaacaacaggcttcccaagacggtattgataaagactttccgctctaaaaaaagaaacgctagtcctaacataatcaagttgattccccagacaatcagatggcgatcaatggctaatcctgtttctataagatacccgattgagcccaccccggccgaggcaatgctgtgaggtaaaagaaagaagttcaatgcaatacagatccataacacccctaatgaaatcaagcctattcgtttgatagtcatccacctgtttcctttctgtatttcaatctattgatcttcttgatattgctgccattttaacaaaaaaagcagcagaaagaagagtcaaatttttcatgtcgctatgaaaaatttgactcttctggtaatcgctaaaacgacaacctttatttaattcaacggatttttttataacaaatgattcgaaataaacaaagttctcttagccaagaaggttggctgctcactgatttgcgcaagtagatctgctacttgtaattcgacttctcttatctgattgtccttgctcgtttgcagatcagattcaggtgaacactcatgcaaaaaaagcaggaagatgcaaaatcgtatagtcacacatcgcttcttcaatcatccgaatagataatgtcatttgactgcttcgagctttcttgtgcgtcgtttttgtttccgggatttgatctgacaggaagctttcctctggtttcaccaggcaaatgattcgggttaagtcaagtagtttcatcgcttctatgattcgccaggtgacttgtggctcaggcatctcacaaaggtaaacgatttcacaactaatcattcctcgcaagatcctgcctagatctagtaaatcaccttgaaacatgctttctcgttgaggatcaagcaatgtcgtctgattcttttttggcacgtacaaaacaagcgtctcgtctctcgctaataattgttttctgataacagaagaagatcttgggtaccgaaaatcattacttttgtcatacgatttctttcctatttcggctgtatcctaaaagggattacgtgtaattgcaaaattaattcgtaaacgtttctttgcgtaaccgagcttcagcaggaatgatgtggtcatcataatgttccaatttgtattccaatcgttctaccgcttctgtcatggttgcaattcgttcatgcaacgctgcgatttgctctgctagcaattgttttctttgaggaactgtctgactcccttcacgaaataacgccaaataggttgacaaagactcaatcgaaagtcctgcttttctcatcttactggtaaactcgatccacttgagatcttcttcatcaaagactcgaacaccatgagcattgcgtttgactggtggtagaagggcaatcttttcatagtagcggatcgtatctgcagaaagaccgctaagttcacttatttttttgatattcacatagattcctcctgctattcctacgatatttctctagtaaaatcaattggcgcctacaaccgcatgcggaagataaggttcttctaagtaagcaacttcttctgtggatagcttcaactcaatggctggcaaagcatccagtaaatgactttcttttgtcgccccaatgattggtgccacgactgattctttttgcaatagccatgccaaggccacttgtgctcgtttgacttgacgtgtctcagcaatctctgccacacggcgaacgatcaattgatcttgttctttagtctgatcatattttgattgtgctgttttatctgtcgcaaaacgtttcgtttgtgcatcccaatcacgagtcaaacgaccggcagctaatggactgtagggtgtgatcgcaattttttgatcatcacaaagggggagcatttcccgctcttcttctcgatacaataaattcaaatgattttgcatggaaacaaatttggtccagccatgtttatctgcaaccgcctgtgctttggcaaattgccaagcgtacattgctgaggcaccaatatagcgaactttccctgttttcactaaatcgtgaagtgcttccatcgtttcttcgatcggtgttgtataatcccagcgatgaataatgtagaggtctacatagtccatttgtaatcgttctaaactttgttcaatttcaaaaaagatcgctttgcgtgaaagcccaccgctattgggggcttttttcattttagaatagagcttggttgcgacgacgatttcatctcgtggggcaaaatcattcaacgcttttcccaatatttcttcgctggcaccataggaatagatattcgctgtgtcaaaaaaattgattcctagatcaagggcttttttgatgacttctcgactttccgtttcttccaatacccattcatgaaagccgcttttcggatcaccaaagcccattgcccctaaacaaaggggggagacttctaatccagtatgtccaaattttacataatccattgtcgttcctccttaagattgatacttctagcatacgccttcgagtgaactccaagtcaacccctttttaataattaaaaaaattcagattgatcgtcagctcacgataattcgtatcttgataattttcccgccaattcttggcccgcttctcaaaatagtgttcggtttccttctgataaaaaattctcgctaaagaaattgcttggtcaaagcatccattgccctgttctggttgtttttccagataaaaaagaattccttggttaaaaatataggtgattctggggcgcaataaaattgtgcgttcgtccagactctgccgatacagtttctggatctttctggctgctggaagattgcggtgaaacacatatttagaaaaaaagttctccaacagatcataataaagggcattggtttgcggaacactttggtacagcttggcttttttcaaaatgcttttcagtaatagatccatctgttctgtgtccaatgcaaaggtaaaaatactgatcaaacgcaactccatctcaccccaattattgacttgctggagatagctgagtactttttgagaatgaatgaatggacgattatttcctgcattgagtacatcttcaatgaaacagcctaaaaactgcggccaatcatacggactctgactttcagcaaaaaaacgttgtgccaacgaacgagccgactcttcttgattcgtattaagatactcctgcatctgctcgatagacttttcaaaacggtctttaaaagtctgtttcccaacaaattgaaactcctcgatcgtcacattgatattttgcaagcatgtaaaaaactgatcgaccgtcaacattgattttccattttcaaaacgtgaaagttgtgcacttgatatcccttgctgacatgcttccttcaaagtaatccctttttctaaacgtagtttcttaaatgtcgctccatagtccattcacagcacctctttacatatatgtaattattccttcgcttttactttacccttttacaataaaggtatcaagaaaggtaataagaaaggagcaaaaaataatgaaaaaggtgttattggtacattggaaaaatcagggagtcgtcctgcttttaatggcaggagtcgcactttcacaaacgatagccagcttgcaaaatgtgcaggttctaaacagtctcatccaattcgatcaaaaaggatttatccaaggtgttgtagggatggtcttagcctatagttgtttcctgatgtttatttatctgcaaatccgttatacagcctatacatctcagaagatgtccctttatttgcgagatcaattattgactcggctacgatacagtgattatcagacattccacaaagttaccgtaggcaactatgcatcaaaattgagtaacgatataaccatgatcgaaacagatggcttcgccaatatctatcaggtcatgcaaggtgtattgtcttcactatttgccgttatcgcattagcccaatttcattggtcattgatcgtgctcaccttaggtcagtcctgtttgttgcttttgttgccgaaaatcttccaaaaaaagatgaaacaatcagctgtcgctaccgcccaggcaaatgaagcttttttgagtaaaaccaacgaactgttagctggatttgatactttcctaaatttccagcgtcttgattttcttaaaaataaactcttgggttccgcacaaagaatccagtctgcaaagctaaaacaagcacaagtgatggctgctgtctctgtaactggcggaattggcaatgtgactggtcaattgagtgtcttaggttttactggctacttggcttttctgcaaatcgttcccatcggagcgattacagcaacaggaaatcttgcttcgacaatttttaatacattaggaaatatcagttcctatctgtcaaaaatacaaggcacattccctttattcgatgcatttgcttatgagaagccagcgcatgagatttcgctacccagcaaaaaaacaaacgatgcaaaagatcttgtgttggcacaagcttcttattgttatcaaacgaccgatggaaaaccgcaacgaatgttgttcaatctctcaaccacttttaaagctggacaaaagtatgccatcgtgggggaaagcggctcaggcaagtcaacattattcagtttgttgactggacggcgcaaagactatagcggatcgatccgcttgggagaaacggaaataaaagaattccctttagaagaattgcaagacaatgtgacagttattgatcaacgtccctttgtctatcaagcatcgattcgcgagaatctgacattaggacaattttttcccgatgaagaaatcgagcaagcgctaaaaaaagcggaactctttgcagttattgaacaactacctgagcagttagacacagttcttaccgaaacaggtggtaatctttcagggggacaattgcagcgtcttgcactagctagaggcttcctatggaaaaaacctattttgttagttgatgaaggaacctctaatcttgatcaagaaaatgctaaaaagatcgagaaattactgttgcaacaaccgcaaaccgtcctgtttattacccaccaccttcgagacgaaatcgtccaaaagttagatggtgttctctcacttaccccctcctagcaaattgatcgcgatgactcttttatcaataggtcctatttgctaaactgaaagtagctgattcaacaaaaatcaatgctttgattcttaataaagcattgacttttgttgtgatgactttttgtctgctaaacaagaaatgagccaatggaggtttttgatggtcaacccacagctaatgcattatttagaaacaacaatcattccacaatacaagcaatttgacacaagtcactcccctgagcacgtctatcaagtgctcgaaaacagtatagaaatcgctgccccattatcggttgacttagacattgcctctactgttgctgtctttcatgatcttggtctattaaaaggacgaaaaaatcatgaacgcgcttcaagatctatggtagaatcagatgcttttttggcggattactttaccaaagaacagcgtaaaataatcggagaagccgtcgaagatcatcgtgcttccctctcctatgagccacgatccatctatggcaaaatcatttcagaagctgatcgtgatcttgatttttatcggattctcgaacgcacgatttactttgccatcgaaaaaaagagtctttctgatcctgataatctttgccaagaggcatttgaatacattcagcaaaaatacggtccccaccatcacttgaccttttggctcggctattcaaaaaatatcgcaggcttagcagagatccatgaaatgctcacagatccgatcaaatttaacagcgctttttctgattgctatgaacaacgaatgaaaaagccgacttcttgagctaagacgtcaagatccggctttgtttcatttttctagtcgttcgatcatttctttcatcttttcaatttcttctttttgagtttggataatatcatccgctagttctttgacctcaggatctttgatggccgcattggtactggttaaaatggcaatcgaatgatgaggaatcattgctttcatccatttcacatcatcaacagccgtttgggagcgcaccatgaaaagtgaaccacagaatacgagtacactgacagctaaaatcgctagattccatttcttattttcgtacattttccacataaataagagcatgatcatcgccatcacggcccccatcatcaacgccataaataatcgagtctgactataaaagatatgatcccattgaaaaacattcaggtacatcatcccaaacatcacgaccgtcgatactaaaatcatcacaccaaaacgcacatactgtttcatttctatctcctctttccataaaaatatccactattagtctatcaggattgattgttcctactcaaacgaaacgcttaattgtgattaggagacgaagcattgttcactcttgcaagttttttcctggttcctctatggattgccaggtatcaggatttttgttctatcgcttttcctaggctttttttcagcttttctgtcagatctttgcaggaaggaagaatccatgccaaagcaataaattttgcagctgaataagaatgtggtaacttgattttatcacatgataaaatttctaggaggaagttgtatgtttttagcaataaatgaaatccgccattctaaattgcggtatgcactggttaccggtgtcatgtttttgatcgcttacttagtttttttcttgaccgggctagcctatggtcttgcccaagaaaaccgaactgctgtcgataaatggtcggcatcagagattttattagccgaggaagcgaataacaatttgaatatgtccatgatccctcgtaatctctatgatgaagtcaaagcagatgagaaagctgtattggctcaaactgcgggtgtgatcaccagggaatccggtggtgaaaaagttgatgtcagcttttttgggatcgaaccagatcaattcttggctcctaaactcacggaaggcgaacttttcgcgaacgacgatgaggcagttgctgacagcagtttgaaagaggaatacgacattaagatcggcgataccgtcaaattagccggcaatgaaaagaaactgaagatcgtcggctttacagaaaatgctcgcttcaatgtcgcacctgttctctacacgacgattggtgcctatcaagaaattcgctttgaaacaaaagataccagcgataaagcccgcatcaatgccatcgttacgcgaggaacagttgaagaagtaccggatgaattaacagcaaccaaaattagtgatttcatcaatgaattgcctggttatagtgctcaagtgctaacctttgggtttatgatcggcttcttgatcgtcattgctgccatcgttatcgggatctttatttatgtcttgactatgcagaaatctgatatttttggtgtcatgaaggcacaaggaatttctagtcgttacatcgcattttctgtcatcgcacaaactttccttttagcaacggtgggcgtattggtaggattagcggcgacgatcggaacggcgttggtcttgccgcaagctgtgccctttcaagtaaacagcctcttttttgcaggtattagtgtgttgatgattttgattgcgattgtcggtgctttcttctcagtaagaacgattgttaagattgacccattgaaagctattggataggaggataaaaatgagtgccattgaatttaaagatgtgaagaaaaccttcaaagatggagatacgatgattgaggctttgaaagagacaaacttttccgttgaaaaaggagaatttgtcgccatcattggaccctctggttcaggtaaaagtacttttttaactattgcgggaggattacaagcacctacagctggtgaagttttgatcaacgatcagccttttagtgaccagaaagaaaaaattcgggccaaattacgattcaaagagatcggttttattcttcaagcttccaatcttgtcccattcttgaccgttaaaaagcaactgaaactagtcgacaaagtcagcaaagagaataaaacccaatctgcccaagatttatttacccaattaggaatcgataaattgcaaaacaaataccccgaagatctctccggtggtgaacgtcaacgggtggcgatcgctagagctttgtatcatgacccaacaattattttggcggatgaaccaacagccagtctggattccgaaaaagcctatgaagtagtcaaaattcttgcgcaagaaacaaaggaaaaaaataaagcgacgattatggtgacccatgatacccgactaactgattattgtgatcgggtgcttgtaatggaagacggtgtcttaaaggaaaaagaacacacaaaaacacaacacgattaatctgaagccaagaaatatttgataaggagttctcatgaaaaaaattatcgttgtcggcggcggtgtcgcaggactatccgccgctgtcagattgcaacaagcaggttatgcggtcacactatacgaaaaagaaagccagcccggtggcaaaatgaaccaaatcaagcaagctggttttacatttgatgtcggcccgaccattgttatgatgccggagatttatcgcgagatttttgaactatgcggtgtcgatccagatgactatatcccgatggaaaaggttgatcctatgctgcagctctactttgctgatgaagcacctctcaccttttccaatgatctgattgaactcactaaaacattagaagggatttctgaagaagatgcccaaggttatttcgcctttctggcagatatttataaacgctacgtgattgcaaaaaaagctttcatcactaaatcgtttcgaggattctgggatttttataatccttaatccctttgggcaggaatgaaattgaaaacattcaacgatgcctacacttcgatctcaaagtttgttaaagatgaccgcttgcgcaagtcgctagcctttcaaacattgtatatcggggtttctccctatcaagggccctctctttatacgatcatccctatgatcgagttgttctatggcgtctatttcatcaaaggcggtatgtatacattagcgacttcgctggctcgcttatttgaagaattaggcggcgtgattcattatgactcaccgatcgaagaattgatcattgaaaacaagcgagcaacagggattcgtctaaatgggcacatccattcagcagatgcgattgtctgtgcggctgattttccttatgcgatgcaagaattgattcctaatgaaaaaaatcggggcaaatacaccaataaaaaaatcagccgaatggcctattcttgttcgtgttttctcttgtacctagggctggataaaaaatatgaagccaatggcttgcatagcatctactttgccgaagacttcaaaaaaaatgtcgatgacctttttgagtttggtgttttgccagaagatccttccttttatctctatcgtcccacattgaaagatgcctcactagcacccgagggtcacgaaggcttgtatgtgttggtgccagttcccgagctgtccaagtttaatgattggcaacctaatacaatcacgaattaccgcaacaaaattatccacacgctaaaagaaaaaacgattttcaatgatatcgatgagcatatcgtttttgaaacctactatacaccacaagatttcaaagaccactacaacgcttataacggggcgactttcggattgaaaccgacattatctcaaagcaattactatcgtcctcataataagttttcttacgcagaaggtttgtatttttgtggcagcagcactcacccaggagccggtgtcccaatcgtgatgcaaagtgcaaagcttgccgtagaggagttactaaaagatgatcaataaggaaagcacgctttttgaacgatataaggaagactttgcttattgcgagcaaatcatcaaaaaacattcgaaaagtttctacagtgctttttcgcaattacccccagaaaaagcacgttccgtgtttgccgtctatgccttttgtcggcaagcagatgatgccatcgatcgttatcaagacatcgttaaattaaatgaactagaacacggattacgacaaatggcttgcggaaaggttctggatacccctttatggcgggctctttctgttgtctttgcgaaatatgatttaaagttccagccattttatgatatgctcgcaggacagaggatggatctaaattttcagccacctgaaacggaggctgatttgagtagctacagctactttgttgctggaagtgtcgggttgatgttgctgccgattttatctagtcaggcaggcaagatccaagaaccggccaagaagctaggggaagctatgcagcgaacgaatattctccgggatatcggggaagatcttgcgatgaatcgaatttatttaccaaaagaaacgatgcagcggtttgagattaccattcaacacctcagacaaaaaaaggtcactgaatcctttatccagctttgggagtttgaagctctgctagcagaaaaactgtacgatgaagccttgtccatgatgcctcagatcgatgaagactgccaggaagcgcttatggctgctttattgatctatcgcgaactattgacggtcattcgtgagaaaaattaccaggtttttctcaaaaaaaatgctgtctctatccaaagaaaagcttttttattacgttctgtaaaacagcagataaaaaccaaccggagtgaaaataatgcaagatgagattttagacgtggctgaacagttgttcatgcaacaagggtataaaggaacttcaacaagacaaatcgcggagttgttaggcattactcagcctaatttgtattatcatttcaaaagaaaagaagatatttattacggtgttcttgcgcggttagcgatagatgtatctgaaaacttatatcagatcgttaatgatcccaatgactccttagcagagaaactgcaacggatggctcgatttctgcaaaaacgtcaccctttcaatttctacttaatgatggatgatatcaaacataccgtctctgaagaaaccgccagaaaactctacttgatttggaaagaaaactatcagcaaccatttattcgcctttttcaaacaagtgaactacgattacgaaacgaactttcctaccagtttattgtcagccaaatgtttattctcattgcttcatacttagattcagcagagaaagaaactgaactctatcaggccattgatttatttttatatggtgttttagataaagagtctaactagacaaacgtatccactcattcttgattactaaataaggaggaagaatatgccagaatatactgacttgactgcgtctgctgctatcgtcaacgcctttatcacaaaatacaatcagctcaaatcaacttatccagaagcggtgattgaactttgtgacgaccaagggcatcaaatcactgaggtcaaaaaaatcaacagcgaattgatcgaattgatcatcgacgatagccaaggaccaaaatttcgttacatccacccttctcaatttgatttgacattcactgtcaaacaataatccattaggacgatgaaataagatactgctaatgcttctcgcaatgagaagtttcagacacaaaggcatactcaccgttgccttttgagttagctttgatcttatatcactgtcctttttttattgcaattctctttgatagacgaatcgtatctattgacgtaaactaacactgatttactattctgaaaggagcatgttatgtcaaagaaccgaatcgaggcctttacagatgcagtgattgctatcgtgatgactttgctggtcttagaacttcaccaaccaaaaaacgatacctttcaagcgtttctaggcattgaacatcagtttatcatttatttgatcagttttgtgatgctggccatttattggaacaatcatcatcatctcttttaagttgcagaagatattgatggatggacattatgggccaatcatttgctgatactctcgttgtcgctttttccttttgttacttcatgggtcagtcaatacccgctgtccctcgctcctcaaatgctctatggtgctgtgattttcttgactgattttagctattatttgttaggacgagcattaagccgggaaagccaaaataatccaaccattaggaaactatttcaacgctatcagaaattaacctttactctttttgtcaacattgtggcattgctccttggctggttgattcatccgctttttgtgatcagtctcgatagtctcgttctacttctttgggtgattcctgagaagaaagccgaacgctacctgaatcaataatcaatgaaaacgactgcttgatatccccctcgacaatccattcacttgttgttcgtcttcttacctgtcgaataaaacaaaaatcatccaacaaagagcccttttgacggcagtcactgattcgccatcaaacgcactttgttggatgatttattattgtttacgcgtgctttgtatatcctagcgaataatactcaacgaaataaatctaccccaggattctttagcacttgctctacttgttcccgtgtaatcaagggaacatctcctaacatcgtatgggccaatacagcattggtgatagcaaaatccgcggttttttttagtggccatttctcggcatatcctaaaagaatacctgctgcatatgcatcccctgcaccgattcgatctagcacttgtaacaattgaggtgcagtttcaacagtttcttctttagtgtagatcatcccgctgataaactgtttgtcttcactggctatccgtctggttcctgtaaaccattcaatcccgtactgcgccataaaggcctgaacgatttgctgttcctctagtccatcaataggcagctgctcaccaaatcccaaaagaccgtgcaaatctcgtacagacccaaataccaaatcacaataaggcagaatcgcttcgtaacgtttttttaagatttctcgctgtccttcttccaaattcagactgggacgaaaattaaaatcgaaacaaactttgatgttcttcaaagtagcttgttttgccaatgttatcgcggtttgccacgtttcttcggtcaagctcaacgaaataccacaaatatgtaaaagatcgatcgtttctaaatattcagcgatgggataagttgcaggtccggaaaccccaaatgaactaccgcggcggttctgatacgtcacataggtggggcgagcgccaaaaccaacttcagcaaaataactgccgatatgattgtgtgcctgaccaatatattctgtcttgataccataagttcgcaaattcgctttggccgcatcacccaaacggttttttggtactttcgtcaatagggatgctgaaagattgaagtgcgccagatttcctaaaatatttacgcccgttcctgtaaaatccatccgcagcgaatgggtttgttctaatgtccgatattcaggcggtgtcaagcgcagcatgacttcaccgtatgcaccgattcgcatcacaattcctccttcactcttacttcaatgaatctttcatcatcttcagtaatcgtctcacatcttccggacgggtatcgcccgtctctgaatcaatgatcgagctatacacgtgaggaatgattttcttgactcctgcatccacagcaatctgcaagatttctgcaaagttatccaaatcaatcccaccggtcggttcaagataaaagtcatgagctgcacaagcttttgctaccgcttgatattcttctttgtgcgccaatcctttcatagggaaatatttgattgaactagcgcccatatccttgagtaatgcaatcgccgtttcaagaggaacctcagtgggttcttcctgtgaacttaacgggccagtggcaatattgacaaagccgactttgcctgtcggagaaactaatgcattaacaatagtttcttcttgtcctaacaacgcccgagatgttgcagctcccgtgaatacttgattgacatgttgcggctgcaacacagcagaaattcgagagaccatctcgctctgattcggatcaccggcaccgagaccaactgataatgcattttctatttctgcttggtattttttcatgtcttcaatcgctgcttcatccgtggaataatttttggaaagaacgcctaataagattttcccttcggctgcttcaaaacattctttggcgttttccactgagttagctaaaacgtttaaacaaattcgatcttctaaataagtcggggattttttcattcttttggttcctccggattcatgatttcttttaatcgattgacaatcacatgcatttcagtttctgtgactgcccgaatatcaaattcaataatgccgtgatttgcttgatattctctcgtgtagatggctggttcttctacttttaatttctggatcacttccatcgccgatggcccattttggacccgaacccgggcgcgataaatgtctcgccctgcaccatcttggacgatatctgcagacaagccaataatttgattgagcgctgagatgaagggttccaaacgatgcttcatggaagcgccagactcgcttccttcagccagatactcttctactgcttgtgtaagccccatcatattttctttaccgatcttcatggaacgcccgatgcctttggattgcagtctcacccattctattagttctttacgaccgatcactaaaccagcacttggcccagacaaagccttggctccggagtagatcactaaatcggcaccctcctggatgtacctgaaaagatcctcttccgctgccgcatccacgatcaaagggatgcccgactgttttgcgacttgagctgtttcctttactgaaagcatacttttttgtactgtatgatgacttttgatatagagaatcgcagctgtctggggactgatcatctgagcaatatggtcaacagagcacatattggcatagcctgcctcaacaacttggcctccaccttgttgaaccatcacttcaacaggtgtgccataatccacattgtgtcccttcggcaagatgatctctcgacgctgaatcttttctgaataaggatggtaaagatggaatgatgagccttgtccaatgactgctgccacagattgagcaattccagcagaagctgaagagacgatttgagcatcttcaacttgaagtagtttggccaaataggcccctgttttgactgctaactcgctcatctcaaaaaagtgttccccaccaaagcgttgggctgttaagacaccttcgctcactttagaaacaccgagaatcgtcattttaccagaagcattgatgacttgcttcaagccaagtttagtcaggttcaatgtcatatacttgtcctccaattatagtctttagcggaatgatctgtcgatcaatacttcgcttgttcccatttgaatcaatcagtactttggctgcttctttgaattcaaagatcgtgaaatcagcatccatttcttcttcgatcgcaccttttccttttagttgaaactgacgagctggtgccaatgttactttctcgatgatttcttgccaactataaccgacaacggctaatttctccatagtagtagccaaatcatataccggacccttcatacggttacgtatataaatatcggtgctgatagaagcagctttcaaattggcggcataggctttttctgccaccgaaaaattgaaactatctgtaccatgaccaatatcaaaagcaacacctttgccataagcatcaaaaacaaacgatttgatggtatttgactgacgatctaaaataccattttccttgccattgaaacagtgggtcagaacgtcacctttctctaaacaagacaaaatgtcagctaaatctggtggtgctgaaccaatatgaaccatcaatggtaggcctgggtgttctttttggatatttttggctaatttcaatggagtgatgccattttcgccaatcactgtcctgctcattctcgcttttaaccccacgatgaagtcaggaaattcatttagggcctttgtgatcagatcccccttgatcttagaaagatcggctaattcatcttgttcgacgatgccccattttgaaatattgataagcgcaaagacattcgttttggctgcttgtgcaaattcgtagaaacgatggctattttcggcgccagtagtccccgcatcgattactgtcgttacaccttttgccacaccgatctgatcgggataatcatagtacaagctcatttcttcaaaacaatggacatgatcatcaatccagcctgccgaaagatactgattcggaagaagtgtccactccttttgtgcggattcttcgatcgtttttgcgatctggcaaattttcccttgcttgatcccgatatcgaaaatctcttcattgagtgtacgtgcctggcggataatcatatccaacatgttaatcattcctctcggtaaatttaaatttggtccacggatgaatatacgacaacaacagccgttcttcttcgacaattgatccaactttattttttcgcggatcgcaatgaggggtcaacaccacctgtaattcgtttttgtacttgccaaaatcatcgttgccgatcacaatatctccaggttggaattcctccagattatcgtgggctgggttatcaaattgcttgtatttttttcggacttctgttgatcgaatcatccgatcagtaatgtcccctcgacggtaatgctgctctttcagaacgatctttcgttcgcatgaagtgctctccggtgtaaaagtcaccgaaaattctgtttggtaacgattgattgcgccaagtgctgcaagttctgcttctgaggcataggcattcccaatgattacatcatcgatcaatcctgttgcaaaaagatgttttgctgcgatctctacaagtaaatgccgatgcatttctaatgtcggtaatccgtcattgatatcccatggaccgatcgttccagactgtgaagtgataaaagcggcagttcgaattcctttggctttaaaacgctggctgcatttttcgaagaactcatacggtaatgcggtgccttcctgaggataaaaattgtgacagccatataagaaaggcaagtttgcttgatacgtcaaaatattgtctaaataagcgatgtcgttgctcatatttagctcgatcgccaatccaaacggattataagtcagcattgcttctttgctgccgtcaaaacctaaatccaagcggatgccatccgcacccaattcgtggaaaaacgtcaaatcatcataagaaatttccagctcttcaaaaattgccggtgcaacatccaaaatcgtttcgtagccaagtgatttggcaaatcttaataattctgtgaatttcttgcgaacaatttctttcccttctgtcacttctaacatgctcataaaaattcgactaaatccatagcgttgagccaattctaaataagctttgtcttcgtcattactgctgtggtctggataaatagagattcctagttgtcttttcattttgtccactccttctgcgcaccaatttgagaaaattttgtgatcagcaacgtactgcaaccaacagtcagtgttgtcaagatcaccagggcaattgttgtcctgccaaatagcataacggcaatgactaatactaataaggattcggctatcagtgtgcggaagcgaatctgctggataaatgctccatgtctggttagccaaatttgtaatccgataaataataaacatgcatacatcagcatcattttatgcacttagtctcctttcgatcatcaaacgcggatcctcgcgcatgcaccactgtttaagcaacaaatgaaccctaattgcttcactcaaaagaaccatctagaaagcactctgggattgaggtgtttactgggatgatcccgtagaattgtttctgttcacctagaagaactcggtatttcccagagagctcatttggttgtcatttatggatcgttctttgctcctatcccatcgtctcgtttgacttcttgataaagagacccttcattcttgagtcgcttgtccttcttcacgttctaattgctgtttttcaaagactttaaagaatgggtaatagatcgccaatgtaatcaaaaagttcaccacaactaagattccagcggcaacactccaatttgtactcatccaagcagcaatgggtgctggaatggcaaatcctagacgggcagccatcattggaacgatccctgtcgtcgtagcaaagtacgaaattgtcgttgtaatcaaaggtgctacaagaaacggaatcccaagaatcggattcatcacaatcggagccccaaagatgaccggttcattgatattgaaaatacctggcaaaatcgaaagacgtcctaattgtttcaaatagtttgattttgagaataaaaacaagacaaccagcgcaagcgtcgttcctgccccaccaatccaaacaaaccattgcagaaattgttctgtaaagatgtttggtaattcatgcgcattgccggttgattgaaaaacttccatattttctgcaatcgagatatcccagaaaggacggatcaccggacccatgattgctggtccatgaattccaagaacccagaagaaacaaatcaagaaaactgtcaataagccgccaaacaaactgtttcctgctaaaacatctttcagcggcatcaaaaggttacttaagaagccattgatatcaaaaccgatgatatgacgaatgacccaaaacaaaacaagaatcgctcccccgggaatcaatgccatgaaggaattggtcacttcagggggtacaccatcaggcattttgatcgtgatatttttgacaataaagaagcgatagatttccactgacaaaatagctgtgacaattgcaccaaatagtgatccagaaccaaggttagcaacattgatgaaacgtccagcatcgatcacaccttctaccgattcaagaacccgaattggtggtgctgccgtgatcaaaaaggacattgttgccaaaatacctgctgtcaatgagtctagtttgtaactttttgccaatgaagatgcgataccaaaggtcgcataaagtgcaagcagaccaacagtatagcgaaacggaatgtctagaacttcacgatatggttcaataaatgctgcaactgactcaataggaaaattcaataatatcgtgaaaaaggaaccgacgatcgtcaatggtaatgtggcaatgattcctttacgtatggccaccatatgtcgctgcatacctaccttatttgccactggcattaacttttgttcaataaaccctacaaatccattcattttagcgctcctaattataacattataatctttacaaggacaatataacacagttaaaaaggtgtgtaaacgtttttttataggaaataagctttcttcccacaaactgagcgatggaaaaaagcttatgtctttcattgtttgaatgttttttcgtagatatagtcatccattacaaaaccttgaccgatatcaacctttcgttccccgacccggacaaaaccccggtgttcgtagacggcaatcgcttgttgattgccgttattgacgttcaaaaagagtgttttgccagcggctaaagattcaacccaatcaaatactttgctggagacgccttttcctcgcatagcaggtgttaaataaagtttactcaaatacagacggtctgcctcttcttcgtaagctgtgtagccaataatctcatcttctaatcgaagaataaaataagcggcgccttctttgatttcttgttggatcgtttctggagattgataagtttctagcatatagctgacttgagcagacccgatgataggtgtaaagacttctgaccaaatctccttaacgacaagctctaattcttgaatctcctctaaagatcggactggttgaaatgtaattttcatggtggactcctttcaaagatgtatccctacatatctttattatatcggaatgttttttaaataaatagaaaagtctttctttgtcttaactattgataatgttgtctatccgcaattgaaagaaagatttagcagcatcagaaagttctgctgatcgcatcaagtttgttaggaaaaattagatgcgatgacgagaaacaggaccagctcattttctggaacagtttctctttctttcaatttttatccgaaagtgctacccctcattttttcgataagtttttttcattccccaaaaaaatccgagtgtgctatactggttacaagaaaatagagactgccaccgggtagttaaaagaggacgatcattccagtaggtcttagaaggaatggtcttcctctttttgttttctaaataatcaaaaaggagggaaatagaatggcttggctcgaactattattagctggcgtactggaagtattctggtccacaacgatgaaatggagtgaaggatttacaaaaatcaattttacgatttacaccattattggtatgatcgccagttttttctttttgtcgcaagcaatcaaacaactgccaatgagtttctcctaccctatctggactgggatcggtgcggtgggttcagtcatcattggtgtggtattgttccatgacaagataaacccagccacttggctttttgttggattattattgatcagtattgtaggcattaaaatgactagcggtcactaacctcaaaaaagtttttttgaagtcttttaaaagacttttataaaatcgaatcacttctttctaccgaaatctttcttatttctacttttgctttcctctaggatatcatcagactactgatcttctcttacaaaagaaaagttggattaccttcattctttcttttctcaaaggctaaaaaagcagcagtttgatcattgatggatcaaactgctgcttttctttttgtacttgactaaaacgagttgaatctcaaacgagttcagcttttttttctgtaatttgtttctgaagaagagctagtatctgtctatcttctactgataaaatataatttttacaaatttctaaaaggacaggttgtcccacttcattaattttctttgcttgaaggtcagtgatatttatcgtctccatacgatccctactttctttttctgataagaatagtttgccattctttcaataaaaaaagaagcaacgggatgtttacatgctagaaacgtggtgtttacactgttttttttaacttacacaacacaaaatgacccttaaaaataaatcggcgattaatctggttcaatatgaatatctgtatcatagacattgaaacgatcagacagcaatgcttctatggcatcagctactgcatgacttttttcaactgtcaaatatttgtccatcgtaataacaatatcaagaaacacatttgcgccatacattctgccgcgaatactcttgacagattttacttccggaaaatcggctacgacttgttcgtactcgttgaccaatgtttgatcaaaaccatctgacaatgagaaggcactttctttgaaaatatcaatggccgtttttaggatcagaacagcgacaacgatcgctgttagactatcaagccacccccagccaaaagaagcggcaaaaatggcaatggcggttccgatgctggtccaagcatcgctgcgattgtctttggcagcagcaagcagtgcggaactttttacttgtgcagccaatcttcgattaaaggtatacacaccatacatgagaatagccgagaccacacctataattgccgcaagcacatcaggactttctgtctccccttgaatcaaggaccagacagaggaataaagtacttgcagccctacagcaagcatgatcaatgacgtaatcaaacttgctacattctctgctttccaatgtccatacttatgttcttcatcagccggtttttgagctaagcgtagacctatcaaaacagccactgaagcgattatatcggtggcattatttaaaccatctgcccataaagcttccgacccagctattttaccgatcaataatttaacgaatgaaatcaatagataggcgatgatactaagcagagcgcccttttctgctcgcttcaattcttcatatctagtctctctcatttatttccctccagcatcaagataacaacttgaaaataataactgaattcctgaaactttgcagtaattattggagagatataatcttttaggaataacaaacatttgctttctgcgccacgaatgcatcttgcaggtcaaactgaatgaaaaaaaatcagaaggcaccttgttgatttcctttagacatattaaacaagctttaaatcattcattgttcccccgtttaatgaaaaccattgtcactgaatgggagacactatggggtatccttgctgctttgcttagttctcttctatagttctcttctatggttttcttctatggttttcttctatggttttcttctatagttctcttctatagtttccttctaaagaaataagagggaaaaatacgggggaaaatgtgaaaattttctattttggcaaagttttctgttccatttcgaagtgatctcctaagatatggctagaaatgaatctaaagagcagcatctgtctgatttcttaatataatatgatagcagttttctaagacaaaaatgaataaacgatgattatttctagtgaaaaatcaccatttgattttatcaatcgcgggcttcaaggtatactcaaagaaagtaggtgaaaaaatggaatctgaaaagtgttatgccaaaatgcaagatggctcggtcctttactatgagaaaattggaaaaggcaagccattattcttattgcatggcaatggcgggagcagtgcttactttgctaatcagatagctgaattaagtcagaaacatcagctgtacttgatagacagccgtgggcatggcaaatcaacgaatacccgcaaaaaaattgattttttcttgatggctgatgacttgtatgccattattcaaaaagaacacctgtcaaaggtagctcttctaggctttagtgatggcgcaaatttagctatggtgttttgttttaaatatccggaattagtgagttgtctgattttaaattccggcaatacggatcctaaaggggttcggctgtttgcacggatcggcagtctgatccaatatgcagtcgtttggctttgcgcgcctttcgataaaggcatgcgtggttttttaccgattcttgcactactctttcgtaacatcggtttatcagccaccgatttaaaaaaaattactgtcccaacactgattttggtaggaaaaagagattcaatcaaattgtctcattcattttatctagccaatcatattccgaatgccaatttcatggtagtaaagggacaaggacatagttttgctcgcaaaaatccaaatatattcaatcagaaagttctttctttcttagataaggtgggacaataaaatgaaactttttacatggattcgtaaccatctctccttgttcaaaggactctttttgatcgctgtagcagtgatcgttttaggtgaattgctttccttaagcaagacgatttccgtcgatcaattgacgacactgttttccgaattagcggtttggcgtgttgcattgatgcttttgattagtttgctttgtattgcgccaatgattggttatgacattatcttaaatcggctcttaggacaaaagctttctgcccgttatttaagtgaaacaagctggatcatcaataccatgaataatcttgtaggattcggcggttttatcagcattggtcttcgctccgaattctatggcaaagaaaaaaatggcaaagatgttgctcaagcaatttcgaaaatttttatttatctgatgtctgggttatcgcttttatcattactggcattagggttcgtcgtctttgggccaacaactgattatctgcagcaatattggatttggctattgggaggaagtttgtactttccagtggtctatgtcttaagtttgtcgaagaagaatggctatttaggcggtctgaccccttctgaccgcggtcaactgattttggtttcattattggaatgggtaggggtatttacggcctttatcaccaccggtatgctgatggggatctctgtggatatttttcaaatactgccattatttattgctgcatctgtgatagggatcgtatcaatgattcccggagaattaggaacctttgatgtcatgatgatcatgggaatgggttcattgaatattccccgagaaagcgtcgtagcgtggcttctgctattccggctattctattacatcattccgtttttgattggggtgcttttgttctctaaaaatgtcagtgtaacgctcaacacacgcttttctggtattcctaaaggattgcttttagaagtattccataagattgaagtactgttgctctatttgactggtacgatgctggttttgtcagcaacgattccggaagcatttgaccacattcaatggttagcccatcttaatccgatacggttgaattttgtcatgcaatacccaagtattttcttaggctatcttttcatcattgctggtcgtggggtttcagctcgtgtttcgcgcgcttattttccaacattgctgttgattgcagcaacgatcggctatgcggtcttagccggtttccgcttttcaaccatgtgtttcttgctcttcttattggcgattatggtcctttccaaaagtgaactatttcgtaagcaactggtttattcttgggaatggctgacgatcgatggccttttgatgggatctttgactgtcctttatgtgattattggggtctataacatgccccatttaaatcgtcatcccgcccatcgttccattgattttcttttgtttccttctgaaaagttatggttgcaaggctttctggctatcatgatcgtcgctatcgcggtcttgcttttctcacgctatttaatgggacccaaacatcaaattggacagagacctgagaatgaaaaaatcttgactcttttagagacctacggtggtactagtgatagccatcttgtctttttgaaagataaagaagtctatttctatccgaacgagaccgatcctaccgtctttttccagtttacgacctataacaataaatgtttggtcatgggggacccagctggtaagcaagaggattttgctgctgcactagaagcctttatcacagaaatggatcagtggaattatttgcctgtcttctatgaaagcagtgaagaaatggtcatgctgcttcatgaattcggctatgacttcatcaaatttggtgagaaagccttcgtggacctacagaatttcaccttgtctggcaaaaaaatgaagggtcaacgggcattaaacaacaaaatcaataaagaaggctttactttcgatgtcctacaaccaccgtacaatgcggaaacatttgccaagctacgagatatttctgatcgctggctagatggtcgcaaagagaaaggtttctcattaggatttttctctgaagattacttgagcaccgtcccaatcgctgtcgtcaagaaccaacagcaagaaattgtggcatttgcttcttttatgcctacttatcagacaggttgtgggtcaatcgacttaatgcgtcatgatcctgaaaaagcacctaatggcacaatggactttttgttcatcaatctcttcgattattttaaaaaccaaggattcgaacagttcgacttagggatggccccgctggcgaatgtagggacgttcagaagcagtttcattcaagaacggatcgcctatttgatctataactttggttctcacttttattcctttgagggattgcgggagtacaagagcaagtatgcagcttattggtctcctcgttatattctctattccagagatagttggatcggttatgtgatgatcgcattgttgatagtagacaatcgaactattactacgtcttctctttaggataaaaaaagactgcgccacaagtaccaataagacaacaactatccagtaatcaaactattgttcaacaaatcaaaaacgagctccacccatgtttatcaaacaatgggtgaagctcatttatgttggttgattcagttagtttgttattcgctggttttgtctgtttgttcccagagttgtttcacaactggaatattgcctaattctgtcatgtttgatggtagaatgactgtattcgtcttactgttgacaatatctttaaaggcttcaatgcccaagtaagagagtgaacgttcgtctaattgactttctttgattgcttcattgatggctaagatccgtttacgttctgcttcagtaattttagcaattcgttctgcttcggcgtctgcatcgatccgtacacgtttagcacgagcttccgcatcaatctgagtttgttccgctcgggcttgggcatcgatcgtcatttgagaagctttggcttccgcacttaagacagcagaagatttctccccttgtgcccgcgtgatcatggattctttatcccgtgaagcagtgatcagtttgttcattgattcaatgatttcttgcgaaactttgatctcaccaatattgattcggtcgatcgccaacccataccccgctgtgatatctttaatggaagtaaacaacgccacgttgatttcttctgttccgttgagaacttcatttagatccattttcccaatgattcctcgcaaattggattgcgcatcttggatcatagaaacgaccgagttttcattatcataaacaaacgcccggacatctgtgacatggtatttgatggcttcatcaatttgaacgataacattatccttcgtgatagcactttgcggttcaatttctaaaggaatctgtttaagtgatactcgttctctgactgtatataaaatagggactaaaaagtgtagacctggttcaagtgtcttaacatacttcccaaaactctcaactacttttacttcaccttgtcgaacgataacagcagtgcttgccaacagccaaatcgcgatcgctatgacaagaacgattaacataatttgtacgatgatcattgaatataccctcttccattttcaaataatgtattgttcacttgtgtcagcaagatcccattttcaacgccgatgatctccagcatcacattctctgctggaataccggcaacaacccgatattcagtatacgtaccaaagattcgaatgaatccggcataatgatctgtcgtggaacgaaaatatttcccgactgcgcggttttccatatattctacgattttagtcaccctcttcactaactaactatccttagattctgtgctatcatcatatcatgttttaccttgctacacagtaattatttaaacttttactttcaatttaatgtaaaaacaagtaaaaataaaaaaacctgcttttgcaagcaacttaattgctttccacaattaaattgcatacaatctaattgtacaaaatcaaaaaaacaggagtgaagttagatgaaaaaaatgtattctacaaagatgatcaacacaggtggccgttcaggagaagttcatagtcctgatcattccttcgaattatccatcgcagcacctggtaaacgggtcgaaaatgccactaacccagaacaactttttgccgctggttttagtgcttgtttcaacagtgctcttgaacttgtaaagcaaaggaaaggaattgatggcgcatcaactgtaagtgcacaagtttcactttatgccgagaatgaaagtagttttgttttaggagtagagattgaaggattcgtagaaggtctttcattagatgaaacacaagaattactagaaattgctcataccgtatgtccttattcaaaagcaacagccggcaatattgaagtaaccgtcaaagctgttagtgagtagactttccgatacaaaaaagctatgataagaagcgtcagtataaaaaggagtgaggacatgaatgacttagcacttgaaaaccaactatgttttcctctatacgccgcttcgaaagaaattatcaagcattataaaggattactggaccctctggacttgacctatacgcaatatctcgtgatgctcgtcttatgggagcaaggaacattgacagtaaaagaattgggcgattccctgtgtctggactctggaactttgactccggttttaaagaaactcgaaatgaaaggctatctttcaagaactcgcaatcaagaggacgaacgttctttaaatgtgtcattgacaggaaaagggcagctgctccatgattctgcggtgaatattcccagtaaagtcaaagacttcctgccattgtctcctacagaactagctgatttgcatcgcttgacgacaaaaatgctgcatcagtttcagaaaactagctaaaaaagatccgacttaccggattgctcgaaacgttagccgaaaaactaacttcttaagcgcagtccataagtcagatctttttttgttggctctctttggacaagcaagatcactgatggtcttttggcattgaaagctcttgttttttggcagtaattttgtccattaacatcgctaactgcttttcttcgagacgaccaatcgccacctgaagcatagcaaaaatctgatcttgattaagaatcgactgcagtacttctaattcagtcactttgggttgaaaacgacgtgctaaaaccgaaccgctcattttgatgctcgcaacttccagtatgcctttattgactaattttctgatgactgataacgaagtgttgcgattcaagttaaaacgctcactaaaatcactgcaacatagtggttcctgagcattccaaaaacaaatcagaatctcccactctttttttgaaaaattcaaataatccatatatgcccctttctctttgctcattccatgaacaatgttatatagctaatttcctgaatccagtctaactgtaacgctgaattgaaaagacttttcagttattcttcattcatacatcaataataatctatatttaccattttttcaaaatatttttaagattattgaataaactaagcgtaaatttaaacaaataaacagccgaccactgatgctggtcggctgctccttgcgattttaggaaatcatttatttgatattgaagataaggctttcatgttcctgatctttcaaagaataaccgcaagattctttatttaaatgagtataatcggtttcgatcatttggatgatttcttcttctgtcaagaattcatctcttactagaatcaatgagttcaataaaacaaaccgtgaatcatacccaagtatttctggaaaaagttcccaaaaatttgaaccatctatttgttggacagcacatttgaaagaatcaatcaattggtggatgtaagtatataccttagggtactctacttccacaaggtcaagcacctctttatcgatcactttctccaaatagtcggctgtttctttatagagcattaaatcaatcacgcgaattatcaatcctttcatgcggacagttcacagtcaatctactgaaacttcctacgtatatatatatcataaaatcggctaaaattattctcattttgagggaataacgaagaaaaaaatgagaataacatcacaaagtatgagtgaagctgaattatactcaacaaaacaatgattttagctaagaaaaattcgttatatataacggtagtattattaaaaaaaaggaggatttttacggacctgctttaagaatcaaaaaggcccgtaacttataaggcaaacatagccagataatctaagtgtcttgcatctgctatcacaaaaatcacagttatcaggtttgtttgctcttagtcacggacctgcacctattaatgtgcctgatgattgactgaaagagatgatgctgtgctagtagaatgatcattcttagcacgaagtgcagatagaatggatactgtatcgatcacttcttgtaacaaagcgccaaacaacgctgggatcacacccgtgctggcaatcaacattaaaacgatacaaatgaagattcctagcaacacggattggcgggcgattctcatcgtgtcttgagaaatctgtacggcttgagagaccttgctgagatcatcttgtagtattaccgcatctgctgcttccgttgcagcactagtaccatgggctcccatagcaatgcctatatcagctgctgctaaagctggggcatcattgaccccatcccccaccatgatgatcgggcgttcagctggttctgtttcttttataacggcaattttttttgccggcaagcagtctgctagaacggtttcgatccctgcttcagctgcgatcttccgagcaacgaatgcttggtcacctgtcaacatgatcgtctttttcaatccttgatgacgcaactgctcaaccgtttgtttggcttccttgcgtaatgtatcttcaaaaaagatcgttcctatccattggtcatctttcccaacacaaacattggttttagcttcatctacaccaactgctccaacaaattcaggtttaccgattttgatcttgtgtccagcaactgttgcttcgatcccttgccctaccacttctttcaagttggtgactggcagcaaagtcagctttcgttccatagcagaagcaaccagagagcgggcgagaatatgagtggaatcctgctcagcactagccgcaatgcgcaaaagctcttcgaccgatagttgatcagcagtcacagttattttttcaacgtgcaactttccctctgtcaatgtgcctgttttgtcaaaagcgatcgtttttgctttggctaatttttcgatcgtggtgccgtttttcatgacaatcccattgcggcttgagcgactcatgcctgctactaaagctactggtgctgccaagattaatggacaaggtgacgccactactaggacttccgcaaagcggacaggatcttttgatacaaaccaagcaatccccgcaatcacataggctgccaacgtaaatggtacggcatactgatccgctaaacgaacaaagcgcgcaggttttgcttcagattctttgactaaacgaacaagaatttgatattggctatctgctgcttttttcgtcacttcaaaagtaatcgcagtttccccattgactgagccagacatcaattcatcaccaggatttttctctacaggtcgtgactcaccagtcaaggatgattcatcgacaagggtatttccttcagtgacacagccgtctacgggaacgatttctcccgggcggacgatgaccagatcaccaatagctagttcttcaaccggaacatcttttttatcattcagccgatgggcggtctgtggagaacgttgcaacagttgccgaagttctcggctggcttgtttgctggcgtattcttccaaactatcgccgcctgtcagcatgatcaaaaccatcaaactggcccaatattcgccaacagcaagtgtagcaacaatggctgtgatcgctaacagatccacgccatattttcctgaacgcaatgtttggatcatgtcgatcaacatcgtcaacgctgtcaatccgccgatgatcgcgatcaaaccaaaagcaatgggaggtcgatcaaagccaaattcagcgatcaacgccgcagctcctacgccgatggcaatcaaaaatttacttaaacgattcattttatgcacctcacctttcaccaaaagcgtaccacttgcaggaatgaaatgaaacaaaaaaccgttaaatgagaaagagaatcgttaacgtagcaggctttcaagccgttttcaaagttcatccgcctcattgtagataaacctactgctggtgttttaaggtagcacgtcaaatctcccgaatcattcatacccaagaaaatagcctatccgcgttcactgattgctttgcgaggagaacagcgttatctcggacataaacccgttgtccatgtataattgatagtaagagattgatgaaacatcgataaaattgtaaaggagacggatcaaatgaaaaaacactgtaggtgcggaaaaaaactagatggtgctgaaacgaaatgtgctgcttgcaaacaaagcaaaaaacaaaaaatcgagtcacttgagaaatttgtcaagtatggcagttttgccttggccgccctttctttagtactaaaagtagtcaaagatcgggaaagctgagttcttatccttagacagacaaaaaaacgccgaaatggcgtttttttgtctgtctttctgaccaacgtgcattagtctgtgatcgtgctgtctaactgccaattgacttttccttgataggttcctggggaaagggtctctatcttaggggcaaaccgtaaataacaatcatactgacttaaatcgagagagagagctttatcgctaggcgtctgctcaaaaagtacttttttatctgaagtaatggtgcaaaacaatgaattatcagtagaatcgtatagaactagttggacttcatcagccaatgaggcgccactattcataaatggggtggtttgtcccgataatttccatgtaccttcactcgtattgctgattgcgagaggcttgctggttgttgcaattggaacttttattggtaccaagccattagaatccattgctcgagccaactcgttgattgtgactgttgttcctttgaaagattctgggactgattttaattcgatgattcctcgaaaatcaatggcaaagtaatggattgctgatgaattgccttctgtgtcgacgacatatgttgcaaaataataggtagtccctggggaaagatcactcgtctctgactctaaagtgtagtggaagggatctgacaaatctgttcgttcaagaactgtttttagagtaaagtcttcttcctgtaattccttctcttgtgaaaataaatcacttataaataattgcgcctgcgtagaattactatcttccacagagatgtcagtataggcatttcgattttgtcgaaggatcggcgcagttttctgcgcttctgacattgtggcttgtccgctggtcaatgttggtgggaatttgccttttaccgtataaaaatgggtagcggctcctcctgaagtaaaactggatataaaagcatttccactaaaggtagtctcaactggtattacttcatcaatattcgcatctataggggtcccactatacttgaccctaaaatgaacaatataggcattccctttttccaatttcggcaatactacacttatttgtcctgtctctcttatatattcgattggggaccccccatcaggaaaaccgttgatcatggtatcttctggtttaccaaaatagacagtatctttcacagatacattatctggaagtgtgagtttgagtttaatccctggattcaaacttgatagatcgcttgtttgtttaaaatcaatataggttgcataagtaatctctttacttgcatccacttcaattggtttatccattactgttcccgtgtccagcataaactgatctggctctctttggaagacgcccgtccgcatatcaatttcgactagaccttgaacatcgacgaaagcgactgctttgttttgggcaaatccgccattggcaccggtaaaaccaaaataaactggcgccgaatttgttaaattaagattgtttttaaaagtatcatcgacaggaatcgatacatctacattaaaatctggaacagcataatgaaattgttgcgtagattcattgtaatccacgataaaggtatgccaatttccatcggaaatgtccgtaacgccaaccgtgttatagtgatttaagactttatccaccatcagccagccgtctgtcgtataagaagcatcggaaccagggtaagaccaagcaatatggtgtccctttgttgtcacatcacgatccatcatccgatcagtagcaaggataccgccattattgttgtaatatgtatcaaattcaattgcgatactatttgcgattgcaccttgactaagtgggtctgatccagaaatattcgaccaaactccaattgttgatccagcttctgaagctagtgcttgaggcccgctactttgcaacacaaaagccagtccgtcgctatcattagccgtattctcaatatagaaagccatttccaaatggaaatctcgtgtgaaagaagtcggattgttgaaccaaactgccccgctagaatttatggttgtgtcattgatttgaacgtagttatgcccttctacaccttgcaatgaacctgctttacctgcagtagagatcattacttgattaattggtaaagtagcaaagtccggcgcagtgaccgccgcaaagactgtttgctgtccttgcaacagccaaaaagttcctataaaaagaagcgataaacaaaaagattttagcatttttttcattcttctcactcactttcatcggagtttttacgccgcttcactaacaagaaaaggatgattgcaatcaatagaatgattaaagcaatcaatagatagaacagaaaatttctttgagcgatagccgctgcatatatcgtagttcggttgacagcttttgctgcttgacgatcgataacgaccttatcatcaaaaacccatgtgcctcgctgagaggataattcgatgcgaatcgtataagtgcccggtttgagttcttcttgttcaaattcactatagagatctaagacagagttttgtgcgaattgaaaattttctgacttaaagccaccgacgatagcttgattcttgtcacgtatcgtcgtattcacggaaatattcccaaatgcgacgggacgaatattactgatactgctttttaaagttggcttgccatttttttcgactgctttagtttcaactagttttaaatctggctttggcagctcttgtagactttgacgcattcgtacccctaactgcaactgatagtttgattccaaacttgcatcagcttcgtgagcagtttcctgaggtttgacttcttcgaacaaaaaagcccctaagatttctccgtcaaacactttttcctttaaatcaagtgtaaaaatcacctttcgttcctcaccagattttaggcgtacttcttgaatggggtttgaaacaaagctagtaaaagacttacctccatagtcttcggccgttttctttcgttgataactgatgattccagtggaagcagaataactattcagtgcatcagcggtgatcgttatctcttcggaactcgtattgtgtacggcgataatcaattcctgaacagtctctttatttaccagcaaatcgaaataagttgcttcacttgcttgattttggggaagttctggtataacagtaaatctgggggtctcagcataaccactagtcacaggaaaataaacaaagctgataaataaaaagatccatactgcattctgaagaagtcttctcattgtcatccatcctattactgtgcttgataagaattagataatgtccacgtaatcgttcctgtatagtcaccactataaacattttgttggggaacggtcaacgttgtggtcgaaaaatcaaaggtattgattgctaacccagttgcgccatctgcggttgctactgaagtaggatcggtagctccagcaaccaattcagcatttgctgataaagctgcatctcctgctgtttcggtaccttttagtgtaatctttgcatttgctaattctttttgatcggcattcgagatttttgataattttgctgttaattgccaaccaactgtgtttggaccacgaaaatcagaaacagatgacgtttcatttgataccgtggtgatcactttctcttgttgagcgaaatctgcgatattcccagtaccaaaatcaaaatttgaaacactaccaagggacaaaatccctggattgatggttagtgctgcttcactggtcattgaagtagatggatttgcttccgcagctaaaccagtcactgggacccctaaactacttattcctaaaatacctaatgccaacaccatttttttcataagtcattccttcttttttgtttattaaacaagatgccaattttctggcaatactttcattttttcaaccacaaaaaaatgattgtttcttcatcgcctcacattgacttctcatttgtacttagtataatcaaaagtaccaaaaaaacggatcacaaaaccttacaaataggcttcatattgtgcgtaaaaatggagcaaaaaaggagaatactgatgtaccgagagttcatttctcccgcagaggaaaaaaagcttgatatattcaaagcagtatgtaacaccaatggaatcagcttattaaaattatcaagagtattgaaaatccccatcaaaagcttgcaaaaacatatctactttttgaatgaagacttgaaatatctgtccgtcaacctttgtctcgccaaaaattcctacaaccaatattgtatcgaaagaaatggagatagtgccgaaccttcttattcactgctggtctatcattacttgctcagttctccacaatatcaactggttcagtaccttattgggcatacagattcttcaatgtcccagttatgttcggatcttcacgttagccaatctcacatgtatcgtctgataaaaaaagtcagtctaatattaaagaaattttacctctcaatctattccaatgaagaaaatattgtcgaacttgctggaagagagttggatatccgcatctttatttatagttttcttacgcaaagtgcaccaaccgagtttcagcttttatctgatcaatatataacagaattcgagcaattcaacagcttttttgatgctactctcttagatcagttgactaaaaataaattgtttgccttttggaaaacaattaccatccgactttctcaaaagaaatatttgcctgaaatcgagaaaaaagctcaagcactcttgaacttttactcctttttgccgatggaagttctcgattcgttctttttctccaaaactaatttagataaacggatcgctcaagccgaatacttgtatttaaatttctttttgcatattttccttcctgcagttgttgatcgccaaaagattcaagagagtattgcgctggtttaccaatcaaaaaagcctctcgttcatttttttattgatatgatcgaagattggcgacaaaaatttgtgccgactatgaagcaagattcatttgaccaacttctaaacagttgtctcttattttttaatctatcgatttttatcgatgttgatttgctgaaagtttggaatttagactataacttgcccgatgaaagttcgattgacaacaatagtcaaacttatacagcaattgctcacttgttaacagaacatgtcaatacctttccaaacaatgatttagacaaagaattctttcaccgtaaacaattgcgttatcttgcccaactactctatctggaaaccaccatgcatgaaagtccaactattcggatttactttcgaacaacgattcaatatcgaaccaaaatgctgatagaagcccgtatccgatccatctactcagagaagtcggtctcattcactaaagatatcgaaggggcggacttgattattaccgacaattacgaagaagtagcgataacggaaaagcttctgctactctcagatatacttaatatgtatgaatgggaatctttgtttgcaaaaatcaatcaagtaattaccaaaaaaatgtttgccctcacttgcaaatcctcttgttgaaacaaattttttatcatgattccataaaaaaagcgaagctgaaatatcagatgggttccttgctaaagcaatgcaaggcctctgtatttcttacttcgcattttttattgtcgtaagcgttttttaacaacgggttttaagcaaagaagcttccgcctgttacactatagacttgtcctgtgacatagctggcttcatctgacgctaagaaaacataaactggcgctaattcaacgggttggccagcccgttttaataattctttttgtccaaactcagggatcgctgattgtggttgtcctcctgaaatttgtagtggtgtccagattggtcctggtgctacagtattcacgcgaataccttttgaactcaattgtgctgccaatcctttactaaatgaagtgatcgctcctttggttgctgcatagtctaacagatgagcactaggttctgcactttggatggaagtagtggtaatgatactgccgccagccggtaaataatccagggcttcttgaactgtccaatacatggagatgatattcgttgtaaatgtgtccgtgatttgttgggtggtcaaatctttaatatctttgaccgcttgttgcatacctgcattcaagaccaaaatatctaaaccatccaacgctttcgctgcatcatgaaccaactgacgcgcaaaagattcgtctttcaaatcgccaggaatcaatacagctttttgacctgcttcttcgatgatagtcttcacttcttgggcatcttcttcttcaaaaggcaagtagttgatagccacatccgcgccttctttagcaaaggcaatggctgctgcacgaccgatgcctgaatccccgcctgtgactaatgctttgcggcctgctaatcgtcctgaaccattgtagctagtttcaccacaatctggtactggctgcatttttccttggaccgctggtgcttcctgttcctgcttttcaaatgtgccgttatagtacttcgttaatggatcattgattttttttgacatgttcatttcctccttatttttttcatgctcgtcatgtagaaccatgaccttacttaaaagtgtagaggaatgttcatgaaatgaaaaacgaaacgctcacttcatggaaaaatgcgtttttcttgcaatttttgaaaaaaaggaccacgaatccttaaggattcgtggtcctttgatttattttgcggttattgttaatagcgcgtcacggagagcctcataatcagatgctgtttgtaggaacagatctggctgactttggtgactatctaccgtatttgacgactgagtacagttcctttttactcttctttttgtgcggcttatgcgggttgctctttttaaccggttatttattgaatcaccgttctttccaaggattggctcatctattcgatgtttccggtaaactggtgacagacttcgtcacgatttttgcattaggggtcacactgatgaacatggcgatcatggggatgctgctgcttgtattcatctacttgcttgggggccagctatcaggcccattacttggtgctgttctgacagtggttggctttagtgctttcggaaatcactggaaaaatagtctgccgattttgattggggtcgttcttgccacacgtttaggctttaccactgagacttcgacctttcaattgctgttgactgcgatttttggaacaagtttagcaccaatcagcggctactatggaccaattgcaggaatctttgccggtattgcccatgcggcgttagtaagcaatattacctacttacatggcgggttgaatctttataataatggtttttccagtggctttgtggcggcagctatggtacctttgttagatgagatcaaccaaatcaaaaggcggatgaaccaatgatagaaaaggaacaagcacggcggatcgtggatgaagtggtcacctactttctttcccacgactgccctcatatcactactgagatgtctttcgaaaaaacaggttttcgagccattattgctgggacctgtccagaagagcccagtgatttagccgtatttgcggaaatgttgaataccccacgagagattgcgctagaaagttattatattgaacttttaggcgggaaccagtcgattcatgaagaaaaagacttttatttattaggattgttgatcgatgaagcaacaatcagttacgaaaaggatcgcttgatcattacattgtttcgaaaaaaatattgaaggccatgggatctctttgatgaaggaggtcccatggtttttcgtttacaacggtctcttgatacacggaatgcgttgaaaaggtgaacctttggttaacagctcccaatacaaaggagggcatcatgaaattgttttcatgacaaaaatgaaagtttattgataggtttttcacactacaattgtttttacgcccgctataattctctttagactttacaaattaaaggaagtgagaatagatgaagaaattttggatcggcctgggtatcctaatgatcgttttgtttgccgggttacaaattgctgagaaagtcatcatgggcggccaaagttactatgttcagatcacgaccgatggcgaaaagatcgaaaccgaagacgatcgaggcaatcaagtgatcgaatataaatatgaactacctggttacgacaaagacgcaaagaagaaaaatctggaattcttagggatgaaagatcgtcctttgaaaaaagacgcttacttaaaaattacctggaatcaaaacaagggcgtgacttcctatgaagaagtgcaaaagaatgctattcctgaaaaagcgttgaaacaattagaaagtgaacggtgataaacaaatggcaaaaattattgaagcaaacgaattaacgaaagtttacggcaaaaataatgagaaaaaaaccgaagccctaaaagggatcagctttgcgattgataaaggcgagtttattggtattatgggtgcttccggttctggtaaatcaacgttgttgaatattttatccacattggaccatccatcttccggaaacatccgcatcaacgaaaaagatatcacaaaattacgcggtgatgcattggcagattttcgcagtagagaaatcggctttatcttccaagatttcaatctactagaaaatctaacggcttctgaaaacattgctgtgcctctctctttacaaggcgtacggccgaaaaagatcaaacagctcattcaacaagtcgcgaatcgcttatccatcagccaaattttggataaatatccttccgagatctctggtggtcaaaagcaacgggtagccgctgcgcgagcattaatcaccgaaccaacgatcttgtttggggatgagccaacgggtgccttggattcaaaaagtgccaaggatttattagacatgatggatgatttaaacaaaaatgaccaagtatcgatcttactcgtaacacatgatcccctttcggcaagttattgcaagcgaatcttatttatcaaagatggtaagatccatcaagaaatcaaacgaaataatcaaacccaagaagacttttatcgtcagatcttagtcatcttaggaaatctggaacagtaggaggataatggtatgctttggaaattatcacttactggtatcaaaggccgcttaaaagactacatcgtcttgttttctggtctggttatggcttctgccatcttttatatgtttcaatcaatggctagtaatgaagaattcttgaaaaacaattcaacgattggtgtcgttgtcattatctttcactttggaacggtcttactaggaatcatcacatttgcctacattctctatgccaattctttcctaatgtcgatgcggcagaaggattatgccatgtttatgatgttaggagcaaaaggacgaaaaatcgcccaaatgatcttcatcgaaacattttttgtagggattattgcaaccattactggtgctttagcaggtatcggattgacgaaaattgtcaatgatcttttagtacaacagttaaatataaagattactcatttttcgccattcaatgtaaaagcacttgtgatcacactggtcttttttgccattctcttcctgatcgcagcaatcgtcaatgcttcagccattgccaaaaaagccatcttggatttgttgagagaaactagtacacctgcacaaatcaagcaaaaattcccattcttattggttcaaacccttttggggatcatctttcttggaatcggttattatgttatgagcgatctaatgaaatttcaaattatgggtattgcgattgccctagtcacgatcgttttgggaacctatctagttttccgctctgtgatcgtattgattttgacattattaaagaaatcagatgccatcgcactgaaaaaattgaataatttcactttgtctcagttaaacttccgtatccgtgactatacgcagatgctttcgttagtatccatgctgttcgcattagcactgggcgcattaaccgttggccttggtttcagaaatgaaatccctaaaatggccaaagcgatgacctcttatgacttggttctgaataatgcccaaactgtcgaccaacaaaaaattgcggatttacacccaacattgaatgtcagctatcgccaaaaagaggatgacacagccgtttattacattcaagaagaatttgacaaagatcctttgatcgttacagaacagggagatcttagtcagagagatggttaccgctcactaaatggccaagcgatcgcagctgatcttgcagaacaggaccagctgcgcagctttgaattgccagaacagcgagggaaagaagtcaagctgctttctgccaatgcctttgaacaagtgaacgcacccgaaacgatcttacaagtcattcaagtcaaagactttgaagctgtcctgccaaaattaacagcacttgctaagctggatcaaaaaaacaatccatccttagcaggagaaagtaatcttatgcaacgagcggatgcttatgacacattcaacggcattttctcaggatttgaattcatgggcttcttcttaggaattgcctttctaacaatgttagctagttgcttgatgttcaaaatcctttcaggggctaatagtgatattatgcgctacaccatgcttagaaaaatcggtgctcgcaatgggcttctgaaaaaatcgatccgcaaagagatcggcgtgcttttcttagtcccaggattattaggaatcgttcacgtactattcggactgcaaatgtttaaaatgctattgagtgatccctatgatcagatctggttaccatttgcgatctttgttgccctttatgccgtttattatcttttaacggtatggctctacaccaatatcgttttaaaaaataccggaaaacaataagcacccgcaaaatgaacacagtgaaatagacagcaaaaaaccaacgtccagtgtgaactgacattggtttttattttgatctgaagcactcgtctttgttttcgaaaatgagctgattttctcagcaacatccctttaacagcttctatgtcaacacatgctttttattggattcagttggttggtttatatccgagatgcatggctacagtacctccactatagcttttgacaactatattagtcagtcctgctgattgaaagtagtgagacaactcttctttgccaggaaaatctctagctgattcttgcaaccaagaatattcttggtaacttttagcaaacagttttcctaacagcggcataatgaatcggaaatacgcataatacagctgccgccaaccaattaaagtgggctgtgatgtttccagacaaaccacttttccgccaggttttacgacccgctgcatttcttttagaacggttacaagatcaggaacatttctcagaccaaacccgatcgtcacaacatcaaacgtattgtctgcaaaaggaagtgccattgcatttccttgcatccattcgatctttgtcttttgctccgctgcttttttctttgccgcagccaacatattctcactaaaatcaatgccgatcacgttcccagtagatcctgttgcttctgccagtgccaatgtccaatctcctgttccgcagcagacatcaaggatatcattacctgcttggacttgcatccgtttcatcgtatcttttcgccagcgtttatgttgttgaaaagaaatcacagtattcatctggtcatagttctccgcaacacgctcaaaaacgtgatggacacgtgcttccttgcctttgtcgcctatcaacctctacaccatccttttgccttccaatcacgcaacctgcgtaaccaaacgattgaaagctttttccatttactacaaaatttagtgtagcatggatagtcaaaaaagaaaaaattcctgtttaaatctgcatatttctattaacttctctattcttttcgctctcagttttcgtaactcttcaaaccattagtagaattggtggtaacgcagcagaaaggctatatagattcaggaacatttctaaaaaaaagctcctgcgacatggacacatcgcaagagctttctcttatagatcagcaattatttgctttggtccagtttcagcagttactgattttttttctttcttgatttgaagaaaccaagactaccgatcgcaaccagtgcagcaccgatcattgatgcaaaccaagtactttcactgccagtttcggcaagtatttgcctccactattattactattgatgttgttgccaccgctgatgttcccattgccgatgatattgattccaccgttattgccattaccgatattatttcctccggtattgccgccaccagtgttaccaccaccagtgttgccaccgccagtgttaccgtcgtcaactccagcaaccggtactgtgactgtagcagctgcactgcggtattctttgccaccagcaacgacactcgcaacaacatataaattatcttttggttcgacgcgattggctgctactacgatccggtaattgccttcactgtctgtcgtaccagtgcccaccacttctccttgagcattagagatttcaatggttacatttggatcagctttccccgtaaccggatacccagatgattcattgccgctgattgttgcagtaggtgcggcaaccgtcacgggactaacgacgatactcatcggatcactgacatatttcccatcagtttgtgcagtagccgtcaacaaatcttcttccgatagctcggctacattgatacgccaattgccagcttcatccgctcttaattcaagtggtgcggcaaaggcacgggtggtgttcaacccacccagaattcgcgccatcactggtgctgcttcattgatgatcagaatgactgaagaacctggctctgcggttccgctgactgtttcgtccccggcaatcgctggatcaatgagtggcgtagccgttttttccataggtactgtgattggtgtattaccactgcggtagtctttgccaccagcggttacgatcgctgcgacgttcaagttttcttctgggtccacttgatctggcgcgatcacgattcggtaattgccgtcgccatcagtagtaccactacctacgacttctccttgagcattggtgatttcaatgtctgcattcgcagttgttcgaccagctacaggataaccatctctctggttaccagtaattgatgcagttggtgcagaaacacttattccgctgacgatgacactgacaggtgtacttggctctttgtcaccaacagtagagtagctaccacagtcactgtttcgccttcagaaacttccggtacattcgcagtccaatcaccttggtcattcgcaacgaccgtcactggctcttctccgctgacagttaccactacattggcgttcggttcagctgtaccgctgatcgtttgatccccggcattcaccggatcgatcgacggcgtttcagtttggttttcttgtgtatcggctggcacaacaaccggtgttgctccactacgatagtcttgccctccggcagtcacaattgctgtaacattcaagttttcttcaggggcaacttgatctggcgcaaccacaatccgatagttgccctccccatctgcggttccgctgccgacaacaactccctgagcgttcgtgatctcgatcgctgcatgcggtgttgctttcccaatgaccggatagccatctgtttcattgccactaatggaggctgtaggtgctgcaacggtcaaacctgcgacgctcactgtcactggctcgcttggatctttgccatctgcttctgccacaacggtcactgtttccccttgagagacttctggtacctcagctgtccagttgccttgggcatccgccactgctgtgactggctgttcatttccgatagtcactgttactgttgaatctggttctgctgttccgctgatagtggtatcaccagccgcaacaggatcgatggttggtgtttccgtttgttctgctgcaggttctgctgctaaccagatggaattattgccatcctcatctgtaaataaatcaagtgtgagtagattagattgagaaaaagtacctgcaaatcgagcttcgtatggattcgacggattcgtcacaccatttgcaatcagctctgaagtcgttggtgtcgtcacggtcgttggcatcacaactgtcgtttgacctaaaacagatgccgatgcgatttgatcagcaagatctgtcgttccattcaacacagcttgtgcagcatcgacggtaacattcagagtggctttagctgtgttgactgtttcttggacaagtgtattgacgccatcgatcaatgagccaatcccaggaatgttacttgctccgcccaagatgctcacttggatttgcgcctgtttcaagttctccaaaatggattggatgcgttggttgaccacaataaataagccgtcattcacattggcaatcaaggcacgttcattatctgtcaatccagcaggcacttcaaaatcggcttgtccaaattgtcctaactgattcaataaatccaattgttcatagatgtcatctagattgacggatactacttgactgatatcaacgatggaagctgcttgatacaataaatttggaaagccattaatcgtctctggaatccctaatgcatccgctaagttctgattcacaagagcatccaccgttcctaccaatgtgtcaacagcaggcgtaagcgttccaatcagtgtttggatagcggcaatattttcaagttgcagagtgatatttgttgatacccgggcattgccatttggttgtacaaagccagtcagcccttttggcacaccaacgattgctactttatcaccgtttaagacgtcaagcgtcaccgcattcgatccgctgatggtaaagttgactgggttggtatctccaggatttgaatatggcgctgcagcacttgttgcagaatcatttgatgcttggacattactaaaaatctcagcagaaaccaatgatgcttctgcgatctttggtgcccacaacaatgtagtgggaacaaccacagaactcgtcagtaacatcccgctgaccgttaaattcgctagtagcgattttttgtttattgcgcgtctttttctccttgaattcattatttttttatagtcattgcccttcattcttactcctcctattcaagtaaatacaaccaacaaaagtgaccaaccaactttggcattcgtcttttgatgttcgctatgatcacatatccggagaaagagatcacaaacaaaaaacgtttgcaaaataaaaaaacacccattcaaatactcgaaaaaaatctcaattacatttttcaacatgccagaacgatttccgtgcttttttgtgattaaataactaaaatattcagttattcaagcaaattatagcgtttttatttttatacaacaaattattaacaccatgaaaaatttaaaaaaattttattggaaataaaataacaaaaaccttttatttttatcgccatcgttaattatttattacctgtgctcctcttttcgcaaaaaaatcattaaaaagagatttttttgattttactcctttttattaacaaaaattagaaactttttaatgttctcagaatacgcttccatcttttcttctttatttattttgtaaaaaagtgaaataagaattattttctgaacagtattctgttttttttaaatcttttaaaaaaaacagaaaaaaactccttaaaaaaggcgattttcaccgctttctcctttttaaaacaattttcaaacaaataagccaccagaaatcgtgaatgatttctggtggcttagaccattttatgagctacttctaaaggatcaatcttgtaatttcttatgcataaacaacgttgtttctcgatagtcatagaagatttttgagaaggccatcaaatcaccttctcgcaagtaactgtcgtctcgaacaaccaaactagggctccccgcgttcatgccaaaaaaagcagcttgtttagcagtcagtaattcacagcggataaatttatcgatgaaactgacagtcactcccttttcttgtgcaaaatattcaaacatggaaccgtacatagcagattctgggatctgaccaacgatatctgccagataataggatttctcaatcaaatacggctgatcatccagtgtgcgaaatcgttcaacttcaataaaaagctgattatcagaaaatcgctggtggcttggtgaaaaatcgatctcagcgtacgagaccaaacgctgtgttgattgaacggtttgaatcagttttccttctctagcaagatcttcggtaaacccaagatcactttggactgctttttgctcttgcgtcaattgatcatggacataggagcctctgccttgaacttggtaaatatagccgcgtttactcaatctgcttagtgcttgccttaaggaataccgagagacttgatagtgttccatcaattctttctcgctaggcaactttccgttgcgatcagctaaatcctttttttcgattcgtgcgattaaatctgcagctaataaatcgatcgtccattgttttgtcatttcacttctcccccaatgttgtactactcctattttaccgcaaaagctattgccttagtgggaatctttatttctttaatatcatgaagacaaaagaaaacccagctaagacatgtttagctgggttctgctgattcaaacttacactttcggtcaagcttttccttgttcttctgcaaatagtttgccatcatacattttgatgaatgggaaccaaataagaaaagcaaccaaggcgcaaattagcgcaaggacaaatgcacgccaatcgccacctgaaccgataaaccctgaaagaccaattggggttggccaagcgacttgagcaatcggtggtttgacaaaccctaaattgattgcaaaatatgccaccgacatagaagccattggtgccaaaaagaaaggaattgccgtataggggttatacacaacaggcatcccaaacaaaattggttcattaatgttaaagaatgatgggacgatcgcggctttacctaatgcatttagttgtgccgatttagcaaagaaggcgatgaagatcaccatgcccagtgtcgctcctgaaccgccaatggtcacgaaactattattgaattcaccggcaaaagcaatatttgcaccgctttggttttcaaccatgttggaaagaacgatgggcgtcaagaatgaggtcacgatcgttgctccgtggattccgacgatccacaatgcatgcatcaagaaatagatgactaacaacccaacccacgtactcgtcaattgcgaaacaaaactaaagggaatcgcaatgactttgaagatatcggtccctaaagctactaaagcaccgttgatcacgatcacgactaaagcaatcaacgcagtcggaatcaatgcagtaaatgaacttgaaacaccagttggtacagtatcaggcattttgatgtagatatttctcttgacacaaaacgcgtaaattttcactgcaataatagccataataattgcagtaaaaataccagtcgttcctaaacgtgtcacaccacccgccatttcccaaccatcaatgattttttgatcatcggaaataagggtcacaagagtcgctactccgccttcaaatactaattgaggtagacacatgaagaatgccatcattgacaacaaagccccgtttacaggacttaacgaaattttttcttcctgcgcttggatcttggtatattcataaccaaaaacaatacagaaatataaggccaagatccccattgttgcagtatttcctagcatatataaactttggatcttatcaaaagaagccgcccaaatcgatgctaaagctggaaaactttgaggtaagacactaataatcaggaacattgaaccaacgatcgtaaacggaatcgaagccatcccggccgccatcaccccacggacgattcgaaattgcgagattcgccccattggtcccattaagtacttatccagaaaggtaaacattttactattttctgtgttcatctatttttcctcctttattctcaaatgtccgcagatagttcaagtaactatcccgatctttttcgatcaaccatgcttttcgttccatatataaacaacaaatcaatcccagagtcagactaaccagtaaaatcggtctggccgcaagattcaaaaatgggaaaaatccgtcttgccaccctaacaggataaaaaggataccagtaatgttgacccctgtttgaatccaataaccaactttagtcaagtgcaatcgatttgatgtctgccaatatttttgtgtctgttcaaagatgatggcgccatcgaccaaaagcaagaacaccggtaccagacccagcactgtccaatttgccagactaagcaacgcccaataaagattgataaagaaaaaaattgctgtcatatagcgaaaaatcagatagcggttaaatcgcatatttttttgtgcgtacgcattggcaccggacgactgattttgtcctctcatagttatgatccactcctctctcatcatttttatcgcgtataacaaccaaacttgttcgaacaagttaattttagcataaatcaaaaatcatgcaagcgattactttttgatgtttggttgtaaaaaataaactcctgaagaaaatcgtctatattcgcacaactttttaaggactattcaggtatcttccagcaaagttttgctcttgtgaaaacggggattttatgttaaaaatgaataaaaggaatgttgattcaacaagatgttcgcttttcaagttataaaaaaaggtttttggtgtaaaatacttactttaaaaggagaaagacgaaaattatggcaaaagaagtaacctacgaatttatcaaagaaattcccaaagctgaactccatctgcatttagaaggaacattggagcctgatttgaaattacgattggcacaaaaaaatcaaattgatattggtcaatcaacaatcgaagaggtggaagcaagttatcagttcgactccttgccttcttttttgaacatttattatccagcgatgaatgtcctccaaacagaagaagatttttatgaattggcaatggcttacttcaagaaagctgccgaacatcacgtcacttatgctgaagttttttttgatccgcaagcccatacctctcgcggtatttcttttgaaaccgtcatcaacggctattatcgagcgacacaagaaagtgaacaaattggtgtacgaagtgccctaattatgtgcttcttacgggatttttctcctgaatcagcagcagaaaccttagaacaagcactaccttttaaagataagattttggggatcgggcttgattcggatgaaaaaggcaatccaccactgaagttcaaaaaagtttttgaaaaagcaaaagccgctggatttcatttgacgatgcattgcgacattgatcaggaagattcgatcgaacacattcgccaagtcattgaagaaatccaagtggaacgaatcgatcatggaacaaatatcgtagaagatgaacggttagtcgattatgtgcggacgcaccaaatcggattgacgtgttgccctgtctccaacagtttcgtcgtggatgatatgaaaggaaaagaaatcatcgagttattggcaaaaggcgtcaaagtgacgatcaattcagatgacccagcttatttccaaagctatatttctgacgacctttatgcattgagcaaaaattatcagctaacagaggaccaaatcattcaattggtcagaaatgcctttgagattgcttggttaccagaagaagagaagaagttgtatctagcggaagtcgatgcttttgtcgcggagaaaaacaattaatttttattcttatacaggcaaagctgcacaagggtaaaacaaacaatcactccaaatacaggattggagtgattgttttttgcttgttcactaaatatgaagatctttcttacaaaagaccatgcccgatgccacgaacaggatacacgctccaatcaataggacaaagattccgatgagaccactacgatctcctgcgatcaaagcatctggatcaaacaatgtaaagaaagtaaaatactttactttttctgcatttccgccggtgttggcaagcatctgtaagacgtacattaatgctggtatcccaccgccgacagcaatactgtattttgaatcattaaaaacacaagaagctaagaaagagattcctgcgataaacaactgcaaacaaagcaacccaccattcagcagcaacagtttgggaatctcgagttctcctttaaattgtaatccgcaaaggatctctaatgcagtgccatagatgatcaaaaagaaaatacccgttaaaagaaccgacatctgcgtcatgacaatcgttctccgcttgatgggtgctgccagaagggccaccatcgcgttgctgtccacatatttggcaatcaatgcattccctcgaagaatcgagaataccattggaaaaatgatcaaaataaaaccatagaggtaagaagacatgaaacccaataatgagttagcgccggctttcatgccgactgccgacatcaattctggcagcatcttgcgcatttcttcaagagactgcatcatttctggattgtacatactgacaatgattgagatgtagagggtcatgacggcaccaaaaatcacaagcgtcaggatgctgcggcgcaattcgcgtttgtaaagggtgaaattgatcatttctcttcacctccataataatccataaaaatctgttccaatgtttgactcgtactgacttgaacttgactaggttgtgccggatcgatttctccattgaaatctgctgcaaaggctgccgccagttgttcatttggcaaagtgacggtataacgacgcagatgtttttctcttaatgtgtcggtggaatccaacgcaactaattttccggcacgaatgatgccaattcgatcacaggtccgctcaacttcttcaaacatgtggctagacatgaggatggttttgccgcgctttttttcttcagtaattaaatcaataaaacgtgactgcatcaagggatctaagccactagtaggctcatctaaaatcaagatctctgggtcgtgcatgaaagccacaacgatgccaattttttgtttcatccctttactcattttcttgatcttgccgttcggatctaactcaaatcgatcaagtaattctttggcccgtccattttcagcatttccccgatactttgcgataaatttaataaattcgcttccggtcatatcatcaaaaaaagtcatttcgccagggatgtagcctaaatttctttggatttgttctcgttgctgccagcaattcatcccattgatcaaacagttgccgctttgaggtttgatgaaccccattagatgacggatcgttgtggtcttcccagcgccattaggacccagaaaaccaaacgctcctgcttccacagaaaatgacaggtcaaaaattcctttgccattgccataatctcgtgtcagattggaaatatcaattttccccatcattcattcctcctattgaccaacgtctattcactagcaaatcatttgctggtttgcccacttgctttttgatactcccgctttgcaagtgatcagtcaaggccctcagtctttgccatacatatcgtatgatgatagccaaagtatagcctatgttgctgtttttgactaccaaaatatccaccgtattctagaaatagtctgaccaaaaaaagcgcctttttaagtcgcgaattgacgaaaaaaagcggcctcttccattcgaagaccgctttattcgacgattgctgttaatatgatttggaaaaatgacgcttctcattcaattagaacttaaggcaccaaatcatggtcaacataaaaggagtttatcaagtaccaagaaaaactgtcattacctgtcgataatgcgaaaacagtttagacaaaaggtgccttttgttccttgatttcagtttacaaaaagaagctgcacgatacaagaggaacgagtaagaaagctcctgtctgggtccttcacttttattctgactaaatagaacacctattttttgctgcttgtcgtctcctcgtgaataaattgctgccaacgggctctcaacttctgacgataataatagcgagactgttttgatccctcttgattgacccaatcaagccacatttgtcgttctttcggtttcagaaatgcccagaattgcatcagcaatagatgattgtcgatgtcttctttcagatcaatcgtttcttcctgctctgatgcgattgcttgaatcagttgtttttgacgattactttttcgttgtaaatcaatcactcgccatagcaaaaagccaaatagataattcacttcattttcgttgcgaaagatcccttcatcaggataccttcgtgcgcgctcaaagagcatgagtcgcaactcttgcaaataatcttcaaaatctggatgactggggaagatgcccgcccgaatcagcactttgtaaaagaggcgctcataagaagccatcagtgtatgccattctttcattgtattcctccttttgcttggtgttcccgcgggtacattaaccatagcaaaaagaggaagtgactatttttatcaaaaatcaataaatcatttgaattatgcactttttattgcaaaaatagtcagataattttatagttgaagtatctaaaatgaaggagtttttctatgaagagatgctactcccctataagttcgaataaacttgatccttatcgtctgtcctttgagccaaaatgtaaacgattcctcaattctagtgatcaggccacttgccaggaacttgctgctttgatccgtccaaccatgacaattgacttcgagaaagaaatttttgccattctgccttttgttcgtgatgatcgcacgcattctttgatcatttatcaagactattgttcacttcttccacagccgccatttcctatcatcaaacagattcttctccatttccatttttatgagtacgcgcttttcaaagatacactgtaccatttatttagccagtcgaatatcaaacgtcaatacaagattccttgtgcaactagcgaatacagcttgctaccactaacaaacgccaccaaaaaagacaccatttgggtcaatcctggaaaaatcatgacgttgtccgcttctggaccgcagctgttcattgaactgcacaatcagttctcttttcccagctcggttgaatcccgtcgtctaaagcaaaccatgctgatcagttttcttgctcatggcattatcaaacgggaacatagctatcaactgcctcgggcgaatactagcctcactgaatttctggacctttctttttctcctctcaccaatcatttactaggggagcttcattttcacgatctccccggcaaacgaggaagttttagtctgatttatcaagatctctatgcagaagaaagccaacaaaaaatgcgccaaaaatgagtgcatttggccaaattttactcttaccaacgcatttgatccaaaaaggggcaattgcaattaatttaaaagaaaatgcaaaagaaaaaaattttttgatcttttcgcgtattttatttttgagaaacaaaaaggtactagtttaagaaaatagtgctctaagaagatagtgctttaagaaagtagtgctttaagaaaaaattactttaagaaaatagtgctttaagaaaaaattactttaagaaaatagtggcggaatgctgcgaaggaggaaaactagtatgcgtattgttaaaatttcagagacagagatctatgtcgaaatgacagggaaagaatcatttacagttacttgcagcagtgagcagctcgctgagcgatggctagcgttgttagaaggtttagccgagtagagcaactgatcttcgaagcaagatccgcaagcgaaaccgcaagtcagctgaacccattggcagttggctgatgcaatgcctgaaatgcctttcttttctcaaaagaggacagcaagcaatgaccataataaaaagcagcggcaaaaatgaagtgtgtccgaaaagttgacttttggtccaacttttcggatcactgcaagcagccgctgctttttttattagaggcctaattcagacgcagggtcaaagaagcctgaccatagtcctgtcgccattcccaaatgtagatggacaccagtcgaatttccagttgttcccattccaccaaggtattgacgtgctgtgacactttgaccgctactaacagcaggcaatgcattgaagtgcatgtaataactatagatgccattcggatgctttatgatcacataatttcctgtggacggaccataaccggcttctaccactttcccaccttgaatcgcataaatcggtgttccactgctgccggtaaagtcgatcccattgtgctggttgccggaagagcccgttggatctgtacggtatccaaaacgactcgagatatggacagaatcgaccggtaaagaccaaccgcttgtttgtttcccgctggcaagtcccggtgtttctgaattaatttcgggattggtctctttgttgcttgtttcttcaatgctggtctcttctttgattggttcagaagcattcgctgatgtcgttacttctgaaccagtttcatttgcggattctttttcttgagaagctgctgtctcagcgactacctctttttcaacttgttcctgagcttttttttcctccgcttgggcttgtttcttggcttcggctgctaacgcttcttctgccgctaattgtttcaatgtttcttcccgtttcttttcagcagccgctttatctgcttccaagtcagatttcttgctctcttcttgattcagagacagtcgtaagtcggctaatgccacgtactgattcaatcgtacatccgcaagctccccttgcttttgttgcagctcgctcgcatgagtttcaatttcggatagtttttcttctagttctttttcgagcttgatacttgtctcgatgtctttttgctgttgctcaacgatactattgctggcattcatgatggtaacagatgcaatcgctcgttgaattgcttcacctagtgagtccgcatcaagcaatgtcgtcatcatggcattcgaaggttctgaaacttggatctctcgtgcttgattcgccaaagtttctttccgtttagcgattttttcttccaactccttgatgtcacttgcgattttgttgaccttttgctcggtgctagcctttgacgccaaaatcgaatccatttcagattcaagttgttggatctccgcttccgtcttttgtttgaacgcttctattgaagcagattcccttttgatttcattgattcgctgggtttgttgttgaatttgacgatcgacatcctctgcgtttgcaaccaatggaaaacctatcaacatcaacgagcttgcgactatcaatttttccagttttttcatgctatctccttttgaatcctacttttcatttctactagcataccgaatattttgctgcttttgggcagaatcacaggaaaaacatctggatgcaaaattctgacatctcgttgcaatcaacttgttagattcccgcatgaatcgtaaattgctttttgattcttttcagactaaataaatcggaggtttgttacacaaagagatagaggcatgctcactcattgcgcacgcctctatctctgtttgattttcattgaatgatcgacaccacagtcaattgaatcgtccagttgccaaatcagctgcagctactacaatcgcttcttcaggaaaaaccattccggtggtaaaagcattgggatagtcatgttcctactagtgcaaaattactgcaagcgcccgacagccgatccaatcgcattccctgctaacagccatgccttcgctgctttttgtaaggtggtgttttcgggatactttccgacatcgttagaaatagtattgaagacccagagtacgccgtcattctttgctggttctgtcaacagcagttcgtagtcatttccaaacaaaacgaggttggaagacgctggcaaccattctttcaacttgggcgaaagcagccaagtatcggtcacgattggtgctgaaccgtatgcaggaaagtaggtttcaaaaaacattctggctgactgataattttcttggacttgctcatgaaccagtttcgcatctgaagggatgtgaagagaaagataggtttgaccttcaagttgtggtgctttgctcttatgatcagcggcgatcatttcaaattctagctgatcgatcctaaattctaatccgcacaaataccgccatgtccaaaatccacgatcaaacacatcctgattaccggcttgtttcgtttcttttaagaatcgagtaaatgccctcatcgtagccaaataaatctcatgaggaatttgcagcggttgataaatatgtttccagctgatggtcgctgcatacaaatggatcgccaattccttcatcgactcctctttgtacagttgggataaccacttggcttctgctgaagctgttactggatcgagcaatttatgtacactagtaatcatctcttgttcttgcagctcctctaaggctgcgttcactttctcttggactaaaacggggatttcaattaaatccatcaattgctgcaatggctcactgttcgctaacatgttgttcctcctattatcaacctggaattcttcttattgatctatgacatcaaagcttgtttgtaaccgcttcatccaattataaaaagtctagcgcttaaatgatactaaaatataccggtttatattaaaatcctaacccattattgcttcaaagaagatagactcatttgtgcctcctctctaggcatttttttcacgaagaaatccgtcctctatccgaaaaggccctcttacacattccttcaagaatctattcgtaagagagcgccctctataggatagctgaaacagctaacttctggagggcgctacatcgtttttcgataacagttcttgcttgattgtactttcttgatatttcttttttattgcagtaatgacgattgctgaaagtgacagtttttcaaaagtacgatcgacttaatagcaactgctaaatcacctagataggatgtttagcagtatttagttggggctgttttataaatcacagccccagacttcattgttgcgataaatcgctagctcctgaaagcctaatttctccgctgcagttcgttttccatttgctacttcgatcatttccgaaaggatcctttcgccgccttctttgatggacatcttgccagtaatgatcgcagataaatcaagatccatatgttcagacatttgttgatacgtctcatgattaccggtaatcttaaccattggtacgatgggatttccgataggtgtgcccctgcccgttgtaaatacacagatttgggctccgccagccaccatccctgtcacagattcaatgtcgtatccgggagtatccataatgatcacccctttttcagtggcgatctctccatatttgacaacttgattaatcgtggcgtgtcccgctttcatgatggcgcctagtgacttttcttccagtgtcgttaaaccacctttttgattcccgggtgaaggatttgctcctcgaatatctacttggagacgttcaaattgtttttcgagaccgccaatgatagtctgaatatcccgtttaacttgttgatttttggcacgacggatcaagatatgctctgtgccaatcaattctgtcgtttctcctaggatcgatcgaccgcctgcagctaccaaaagttctgtcgcaactcccaaagcaggattgacggataacccactggttgcatcactgccgccacaattggtcgctaaagtaagagcagatagttcaacgggttccctcacaatccgggcagccgcgcctaccagtctttctaataaaggaacgactgtcgcgattgtttttgttgtcccgccttcttcctggatgctaaaagagtagaccggtttgtctgataccttctgaacccgagccaccatttcgtgaggctgaatcgtctcacagcctaacccgacaaagactgccccatagacattgggatttaagacaaatcccgtcaacgttcgtttggtgatttctactgcatctccaatttgaccacagccttttccagctgggataaagaccgtgccggcaattcgttcagccagacggcgtgcagtttcattggcacagcccactgtcgcaatgactaaaattttgttgcggatcccatattgcccatcggatcgtttataacccattattggtttcattagactctgatgctcctcacattatgtgtatgcacatgttcacctttggcaatcgctgctgtagcaatccctatcacttcgccatatttgataatctcttcgccagattcaatatcttttacagaaaatttatggtagctgtcaatagactggacaatcaggaattcatttaaggtcgcttgattaacaatcttcacggatgattccgccggcgttggttgcaaaaccatggcaacattgtcctcgggacgcatcattaatgccgtatacatagactgcctcactttctcttcactcatatttgtcttgaaagacaatcgtgtcgatcgctgcctgacgcaaatgtgcgactaattgtgacaaagacatctgttcacgttgcatgattgcttcaatcactaacggcagattgaacccggcaacgatctgatagtggttagggtcaaaaaattgtgaattataataagcacagttgtaaggcgttgctccaaacatatcaacaaatactaagaccccatgccccctatccagcttgcgactttgatctaaaattttttgacggaaactgtcgacctcttcattttcagcaagtgtgtcgaacgccatctgctgtgtctcaccaatgatcatttgtaacgaatgaacgatcccttggctgagttcgccatgagaaataatttgcataccaatcataccgaccaactcctttcattcaccagaccaaagggttctaagtgcgcaaaaaagcgctcaatattcgtcactacatgatctcccattccggctaaactttcagaagtatacgcaccgatatgaggggtcaatgtgacattttcaaaagccagtaatggatgcgtaggatctaacggttcctgacaaaagacatcggcagcataaccggaaatttcttttctagccaacgcacggatcaaagctgcttcatccaccaattccccacgtgcagtattgatcagcaagacatgctgcttcatttgatcaaaagctgcatcagaaagcatccgctggttttcatctgaaagattgcagtgaagtgtgatgacatccgcttctgacaataattccggcaaagatactttttttccttttgctttgtgaatatcttcagcagacttataaggatcatagactagcacttcagcaccaaagccttcatgcagaatctggccaaccttggagccgatattgccatagccaatcacaccgaccgttgcgtgcttgagttcaaaactattacaactcgaccgcaagtgccactcatcatttttgatcagccgctgccctttattgatcttacgaagttcgttcattaacaaagcaatcgcatgttctgctaccgcttgccgttcgattggccctaaaactttggtcaccagtacctgattttcggttgcagcactaaggtctacattatcgacccctagaccatgacggcaaagcaatcctagatttggtgtattctgaaaaaacgtacgatcgaaagttggcgtgacactagcgataatgcactgatagtccctgagtgcctcagccagttgtgcccctttaatcgttggttcaaacagatgaaagtccacttcaccaaatgcttgcagtcgttggatatgttccggaaaaaacttaccaaaactttttgaattgactactgcaatttttttcatcgacatcccccctagatcgatttcttcgctgcttcgggaaccgtttgcgcataaatcttgatgcccttttcagctgataactgctgcaattgttccaactctgtctcggttagggcaacatttttgataaagaactcggccgattgtctttttggcgtgccgcctagattcaaacaaggtaacggtaaccccaactccaaacacttgatcgctgttgctaccgttttgaacaaagcaaatactttatctgcaccgaattgattggcttcccaagctgccagtacttccgctatgctgtataccttcacttgaaagccgtaacgttttcctgaagccatgtaaatatccatcgaaaaatcatcggaacgcaccgcgtcatcgataatataaatcgtattcgcacccgaagacttggcccactttgtcacgatctgaccatgaatcaagcgactatctactcgagcaaaagtaattttccccatctgtgacaccctctttctgatttataaaattccgatcgctgccagcaatccaacgataacagtcaacaataacatcccttttagtacattcagacccttcttttcaaagtagaagtacaagcccatgaccagtgaaagtggtaagatgcctggcaagatagagtccagaatactctgtaaagcaaattctctttctgacaggacaaaagataatgaagattgaatcgtcacaaaccgtgccgccgtcactcccatcatgaacatcccaaggatcgtcaatgctttcataattaaattggctctcgtcccggcaatcagttctcgagccgcttgccttcctaaccgataactaaagtggacaaacgcacggccatagagatacgttacaacagaaaagacgatccagggaataaccgcaccgaaccacaaaccatctgcagcccaaggcagtgcaattgcaatcagtaaatactgcaacgtgccattattaatggaatccccgatccctgccattggccccatcaatccgacttttgttgcttcgatcaattctgttgaaacggtctgttcagaacctgtttctgccaactctttggcccgctgttcttccagagatgcagtaatcccagaaatggtactgccgccccagatcgcatcagtgttccaaaaggtcaagtgccgattgtaggcatcccgcaagtcttcaggatctttatagatttttttaagcagaggcgtcaatgcatacatcaacgctggtgcgacttgtcgctcataggtgcgagggatctcgttcatccagtaccagcgattccaaatctggttcagttcctttttagtcagtccattgttttcagtcgaagtattctctgcatccatctaggctgcctcctttgcattgatcataatcatggtgtaaatgcctgcagtcacgatacccagtacagcccaagtaaccatggtgattcctaaatctttcaaaataatcgttaagaagaatgccaaaaagaaaaagaacatatcggtcttttgaccaatgatccgaatcaaaatcgcgatcccaacagctgctaacgcactggcgacaacatctagtatatgaaagacaaccgtgccttccaattgtgtcacaacattagctatcgaatctgtcccgaaatataaagcgataaacaataccggcacatgagtcagcatcgtcaatagggttggcaacagaccgattgcaaaagtaaatttcttgtcctccagattattgaccacccgatcaatgtatttggtcacaaaagaattcacgataatttttaatgtatataaataacttcctagaattccgacgggaatcgcgattgctactgccgctgtcggctctagattacccaagatagcgactgctgtagccacagttcccgagacagccggttctgttgccatctggccgcctggcgcaatctgacccatagaaatcaattggatagctgcaccaaccgttaccccttgggcaacatctcccagaacgacaccgacaaataaactcgtcataagcggactaaaccgcaaattcaagcctgcatacccgaagaagcgggcttgaatcaacgccacccaaattgagatgatcaacgcctggatcactgacatattttttcctccgtttctaattctatcaatgccaacagtgaaaaatgaaaggcgaatagaaaccaactcttgctttttacctaggatgaaagcatttcttgatccgccaacaaaagcagcttccaataacgaaacagcgtcccattcccatgaaaaccactcgatcaagaaacagcaaaaaaggcatcagaccagcgtgtccaatgcctttgacatagcgaaataaacctcaggaaaaacgtgaaaatttcaaaaaattgcacaaagcgactagtaatcgctatcaactttcggtaaaataaacacgttggttccttcgggaaacaactatggcaaacttgattggtcagctgtgtaaacttggtgactgatcagggctttctacaggtgcgccaacacccgtagaaagtgcctttttttatttggtttctattccatttcatcatatagaaagcgttaccttttgacaagagggaacatacgttttcgtggagttttttgaggggattttttggggaaagaaaaagaagatatggggtatcttcttaggggtggtgtttttaggctttgagttaataaaagacggttatttggtgactgtcttccctcagtttttcaattttatagggtcaaaatagctttgtagaccaatgtaatacagcgttataaaacaaactaaatctttgacctaaaaaaatgattttagaattgtaataaaaacaattccttacttcaacataaagtgaagtgcttcttgccacgttgggatttcaaagccaattgctttagcttttgacagatccatcactgaatattgtggtcttttggctttttgcggatattgttctgaagtcaccggatttacttcgactgtggtatcttttaatatttctttcgcaaattcataccaagaacaataattgtcattcgataggtggtaaacgccgttaggtgatttttgatcaatcacatatttcataaattctgccaatgttcgtgtccaagttggacgtccaaattgatcattcactacggtcaagctttcatgttctttggccaatcgctgcatcgtataaacaaaattatgaccatattgtccaaaaacccaagaagtacgaatgatatagtaatcactcaatatttcttgaacagcttgttcacccaataatttggttctaccatactcatttagagggtttactggatcatcgacacgatattccccctcttttttcgtcccatcaaaaacatagtcggtactgatgtaaacaagagtagctcccaccgctttagctgcttgagccacatttcgggttccatcgacattgattttttcatcaagtattttcccttcatcctcagcttgatcaacggctgtgtatgcggcacagtggaaaataacattgggcttgatttcttgaacctttctcatagttgcttctgaatccgtaatgtccatttcttgagcatccgttgagacataatcaacacccgtttcatccaataaatggtgtaattcagtacctagctgacccttgccaccagtaattaaatacatctttcttcgcttcctttcgaaaaaagcaggaatcctcctgctttcatcctacagattattgtccttgttgggcataagtttcttcgacttgttctttttctgcttgccaccacgaacgattggttttataccactcaatcgtatccgccaagccctctttaaagttagtaaattctggcgtccagcctaattcttctcttaattttgttgcatcaatggcatagcgcaaatcatgaccaggacgatcattgacatggtcataggcatcctttgattgccccatcaattcaagaatcatttcaatcactgttttattgtcttcttctccgtcggcgccgatcaaatatgtttccccaatggctcctttggtcaaaattgcccagaccgcggaagaatggtcgttagtatgaatccaatcacgcacatttttcccttcgccataaagcttggggcgaatcccacttaatacattggtgatttgtcgagggataaacttctcaatgtgttgataggggccataattattggaacagttagagagtgtagcttgaagtccgaaggaccgaacccatgccttgaccaataaatccgatcccgcttttgtcgacgaataaggactggagggattgtagggggttttatcggtgaacttctcgcctggcccatccccatgacctggtaaatcttcccgcaaaggaagatcgccatacacttcatctgtcgaaacatgatgatagcgaacatggtgtttgcgacaagcttcaatcaatgtgtaagtaccgatcaaattagtctggacaaaaggaaagggatcttttaatgaattgtcgttatgagactcagcggcatagtgaaccaccgcatcggtctgttggaccagctcatcaactaatgccgcatcggcaatatcgcctaccactaattccacacggtcttccggtagtccggctagattttctttgtttcccgcatatgtcaatttatccaaaaccgtcacatgaacatccgattggtgattgaccacataatgaacaaaattggatccgataaaaccagctccgccggtcacaatgattcttttcatttcatgaacactccttaaatttctccgtaaacaaatggattgtcagcttcaaatgcttgtaaggttgggtggtgttgatctttctccgaaagaatcgcttgttctttggcaatcggccaatcaatcgctagttctggatcatcaaatgcaatgccggcatctgcttgtgcattgtaatagttgtcgcatttatacaaaaagttgacattcggtgtcaatgtaacaaagccatgggcaaatccttttggcaccaacaattgacgatggttgctttccgataatatatacccttcccattgaccataggtcggacttccttttcggatatccacaattacatccagcacggctcccgtcacgacacgaatcaatttcgtttgggcagcctctcctttttgaaagtgtaagccccgtaagacgccggcttccactgacaaggaatgattatcttgcacaaacgcatagtctaagcctgcggctttgaaatcttcttgcgaataactttcggtaaagaagccccggtgatcaccaaagactgctggttcaaccaagacaacatcggttaagtttgtttttgtgatacgtaattttcccatttctattcctcacttgctaggtgcaataggtattgaccatattgatttttctttaatggttgcgctaattcaatcagcgcttcacgactaatgtagcccatgcgataagcgatttcttctaaacaagccacttttagattttggcgtttttcaatggtttcaataaatgtcgaagcttctaataatgactcatgggttcccgtatccaaccaggcaaaccctctgcccatcacttccaccgatagttttcctaattcaaggtatctttgattgacatcggtgatctctaactcgccacgttcagaaggagtgatttgtttggcaatctcaaccacctcgttgtcataaaaataaaggcctgttactgcataattggactttggtgctgctggcttttcttcaatcgacacagcttgcatttgctcgtcaaattccaccacgccaaagcgttctggatcagtgacatgatacccaaataccgttgccccttgctctttttgagctgcacgttgcagcattttagataagccgccaccatagtagatattgtcgccgagaatcagacagacactgtcattgccaataaattcttcgccaatcaagaaggcttgcgccaatccatctgggcttggttgtaccgcatattccagatgaatcccaagttcatgaccatcgccaaataattcttgaaagcgcggggtatcttgtggtgtagaaataatcaagatctctttgatccctgctagcatcaatgtagacatgggatagtagatcattggtttatcatagatgggcattaattgtttggatgttgctttggtcagtggatacaggcgtgtacctgaacctcctgctaaaatgattcctttcaaaatgaatcaccaactctagatagaatttgtttttcataatcactatttttaatttcaaaataaagctgcccattatttgactcattgacatacttacctggaatagcttccttatcagaataatttcttgtaaaccactcatattccgtatcaatgtgtccaatgtcaatggcacgaaaaccatgcctacaaatatcttgagacataatacttgctgtaggtcctaatgcaagtaagcacaaataatcttcattatctttgaggaaatctatggcggcattaataattaaatcatatttactaaaggcatttttgctaggagcaataattcttttgattttcccagaatttctaaacaaatcatttccaactcccatcttagttccatctccttcaattattaatagattcttactatcccaaattgatttgattgaattaaaataattattcattttttttgaatctttttcacgatccgccatatataatcttgtaaaattagcagcgccatacgtataagagaaatctaatttttgataccattgatttctattaaataaaagatattttatccaccatttttttgattcatcagttctgaaatttaagttactagaatcaaaaacataaggaacacaaataagaagatcttcttgatttgtatttttaagggctgcttttagttgctctgccattttcttatccaatttttgaaaaccaggggaatgattttgatctattattcccatttcaccatcactgaatctcgaaactgagcattcggattcaattatatagtttatagtttcagtaaaactcaaaactttgggcttttcatgaaaacgttctaaaattagattaattggtatattagcatataacttcgttcttcttagtaaagtaattaaattcatatatttctcctaaacaatacttttctatatataataaaattaatgattaaagctataattacacctgcaaaacctttaataaaaaaatgaatccaatcatttttttcagtaaacactaaattgttaaataaaaaagatgacaagctaattagaataacgctcagaatagatttaaatgtataaatatagaaataattccagcttatatttatatattttgacgaaaatggtattgtatagactattttagttatcacattaacgatactactaacactagctatagcaaaaattccatattcggtatatttaacgaaaacaaatgatactattatacttataatcccagaaaaaacaatattcaaagaattaatttttattttattaacaagtacaaatatatttgtaaggacttctgttccactagaaaaaattgttccaattagagataacaagcaaagaatgaatatcaaacgtatattttgatttggtacccataacgaatagaaattgtagcccaaagaaattattaaggcaataggaatcgttattataaaattagataacgcaattgctttttctaagtaattatgcatcacttccatcttcttatctccgtaatataaagttatttgaggaatgaaaacatttgtcacagtagatgaaagctgagaaattattgttggtaaaacctttgccagagctaatattcccatgctctcaggtcctaaaaatatatttgctattaacaaatctaaacccgttaataacataacccccatttggccaacagaattccaaatccctgagccaactagttcttttaaagttttaatattaaacaatctgaaagaagccttcagaaatggtgttaattttttcttgtaatataacgaaaaaagaacagaaaaaagcgcagcaataaatgaagagaatgcaataaaacttacttttataggaaaaaaataaaataaaattagtatagaagctgctctaataaattgagattgtatattcctcacagactgaatatacaacttattagttaagaaagtagcaatgttccaggaggaagtcaccgtagtaattgaaaaagttaagaacgttattaaaaataataactttatatccttaattaattcgtttggaatctccaaaaaaaagcttatatagttggtaaaaaatatcgaaaatattgttataatcgctccgatgatacaatttcctatggttacatttgaataatacaaattagctcgttcataatttttacttacaaactctaaagtaatgaatctattagccatagagtttagagcaactgatattagtgaagcgtaactaacaaaattattagctaaagtaatatatccatttgcttcaacacctaaatttcttactataaagggagaaacaaatagatttaaagctaaatttattgacagtgcaattattccaaataacaggtttctattattaatatagattaatttgaatttcatattatacaaaaccttttatttcatcagacattttatcaaattcagaacttacttctatttctaattcgcttatttctaaatctaataaatacgctaatttagccaaaatatcttctttcgttgttatttgatctaaaaaaataattgaatttatattcttaatccattcaaaaacccccttaacttttccactactattgtcgaatgcaagacaaggtgtaccagttattgcagcaaatatcataccgtgtagcctgtccgtgataactaactttgatgttttaaattctaagaatttcttatcaagttcttcatttctatcatttatattgatgcgtttattcacaacagtatccgtaaattttacaatatatttattcagaatatcaccatttagtaactcttcaaaatactctttcttactaaaatttcccattttttccttatcatttctgaaacaacataatattttattctctcttttaatatcttcttttttttcatttaagtagagtaccatgtctggaaaataagctacttcatcaaatgactctccaaaattatccaaaactgtcttataagaaactttgtctcttaacataataaatttttttccagaatgtttcttgtatatttctttactcttttctaattcctcgttcccaaaactgctgttttcataaaaaatagtttggggaaaaataataattttattatttttatgtgttcgaaaaatctctctaactaattcttcttctcccatccacaaactacctaaaaatcctcctcctgtaatcaagattatatcttcgtctgaaattaaactgtttatgatctttttattcgataaataaaaagagcttgtaatctcaactatatttttacagatatttttatcttctaaaaacattttttcagctaatgcgatagcgtgatcccccaaattgccatgattgggtgtagataatacaataaattttctatcagaactattacttctgagcttatttagttctttagaatatataagtgaataatatttttgctttacaatgtttttcatttattattcctcactaaccttttaattaataacttcattttctgtttcatagtcaaacttgttccgtaattagttaatttcccacaatatttattagtatagttcatgcttagacaagaagatgtataatatattccttttatacgattaatcaaaaattttttttcttcatccgtgaagttttcactatatttatataaatcatttataataatattgtagtttaaaattgatctctttttattttgagttgtcataatcgaaccttttcggtatctccttttaaagaattgctcgtttatgtagtaaaaattattgcaatttactaataactttggagtaaataattcatcttcatgcaataagttcggtctaaatgaaagattattcatttttaatatctctgccctaaaaatataaagccacactggagcttggtattttttttcaattaaattaagaaaatcactttttccataaaccttttcagtttgataaactttgttggagttatactcatttagatctacattgaaactaggatcatctgaaaatggagtagcatcaaacttaacaagatcaacattcgttttattaaatatttctataaccttctcaaatgtgttataacttatgtaatcatctgaatccagaaaatatatataagttcctttgctgtgtttgattcctgtattccttgctgaagagagaccactattttcttgtgaaataatcctcatactttcaaataacttttggtatttcaataatatatcaagagaattatcactactgccatcattaacagcaatgacttcaaagtttgtaaatgtttggttcaaaagtgaatctaggcattcttccagataattttcaacgttgtacacgggtagtataacacttaaaataggattcatacttaatactccaatcagaatacactacggaatgaaaatggtaatagtttcaaaccggtattattattatttattaataagtaaaatgtaatgaagaggaataatccataacatataaattttattattgaggatatctttttgtcatggattttatttactaagttagcgaataacacaatatatgtgctcgtaaaataaaaagctattcttactgccagatctccaaagttagaaaaacaagtaaccaataaaaaacctatccaaatcagtttaaaccggataaaaatttctttttcctcacctaaattcttataaaaaaacaaagtcattgttatggctatcaatgctaacaagatattaaaatatgataatccaccattcataaatgattgactattattaaggtaaaaagtataaatgccatacttatataaaatattagttattatgttggagcttacaagagctataaagctgataacacctgaactaatgaaaaatatcctatttggtaaaaatttaattacaaaacccgcaaacaaagggataatggctgttgtatgaaatagacaggcaactaaacctaatagtataaacgatctaaatttatctttttcaagaaaactataggcataaaatataattgagatagcaataaactgtctcaatccattcatagaattaaaaaacattcccaatcctaagaacgtccaaaaactgaatattatgtcattagatcgccttattattcccaatgtataaaatgtaataattataatcgtagataacaaaaatattatttgcggattctcaaataaaaacattcctattttatttaaaatataatatccccactcgatatttaaacttttcaaatcattatttccattaattatttgataaaaaatattttcataagtattgtaatctgttccaaccttatacctaaaaccactaactattaccaacggtagataaaacataaaaaaaacgatatatgttttaaagtaatgcgctattcttacttcgttgccaaagcgaagtgaattgataatactacctgtaaaaaaacaaatacataaaaggatatatggggtcaaaatctattcacctacttttttcaacttaataaagtttgaagataagaaaacaaaaagcaaaattacaattcttttttttggtattttagaattaataataaatcttagtccactacgcattcctttttttaattcttttaaaaaatcgccagcatcttctttatatccatatctcaaagctttcaaatacaaagaaaaaaaagaatgatagtatctagttctagcataggaaatataagtcttgtttcctgtatctagtgctaaattatacactgttctgcaattattaatcatacccttatcctgtatttttaaaggactttgagtagagctcttattgttccgatagtaattatatccgatataatctaacttaccatataaattaatatttttgagaatgataaaattaaataaataatcttcacaaaatggctctagtgagaaaaaaacatcttcgattgattcctttcgaaacattttgttacaaactgaataagaactattcggaatttttatacctttatatagatagttttctaagatattgattccacttaaaatatacgaatctgtttttataacattgcttgtatactccattttttgtgtgacttgaaaatcacattctacaacatctaagtgattaagctcaataaattcaattagatattttagataatttttatcaaaccagtcatcggaatcaagaaaacatatatattgtccctgcgctaactttaatcccaagtttctagcactactctgaccagaattatcttgatagtagtatgaaattttaccagaaaacttatccgacattttttctacaatggttctcgatccatctgtcgatccatcatctactactaatacttcataatcttgataatcttgatttaagatggatcctaaagaaaattgaatggttctttcagcattatacattggaataatgatacttattttagccatgtatcttttccttcccagttattcatgaatattttttataagtgcgtcctcaataactttcattctgtcattaaaagcttctattgagaaataagatctaaatacattttttgtattatctaccattgaatagtagtccttttcacttacctcaattattttattaacatctttttttaaattattagacaaattaaatccgcacttattttctttaactaatttagacgtgtctgcatcaatattattaattaaaggcagaccagcttcaaaataatcaatagatttcatagttaatcctacacaaacagattctttcataatattcaatccaaaatgagatttctcaaaaatttctcttttttcttccacatcataaacaataccatagtcattaactgtgatatcaatattttttagttttttaataaattcttctttcttttctccatcaccaataatattaatttcaatatctctttttgatttcatttctttcattaactcacatattttgggaatatcaatgatattgtttatagagcctaaataacaaaaaacaactttagattcaaaagcatgggtcaaatcacccaatgtatttttttcttttgctaaataaagagtttcaacattgcaatctataagctctttatgcaagatatctctatacaggtcacattcacttattattagatcggcaatttttaaataattattccgtctgtttttccaaatatttaaaactggagaaaaatttttcttaaaaggcattgtttcaggccataaatcaattaaatcaaaaacaatttttgttttaggatatttttttttgtatagtaatgcttgttttgcaatcgaattaggtgggattactacgtaaataatatcagttttatttttttttatttttctaaaacttttttttgagaatattagatgtgataacaatcttttaaaagaaatattttttttatatttagggacattaatgaatgaataattcttttttgaaactatcctttttattttctttatatgctggaagtttgatgccacaatttcaacaatgtaacccttactttcaaaataattagcaatcatgtcgattctttgttcgtatgtatcaaaacaattaacaatagtaattttcacttagtcacatccttattcttcatataaataagattcccaaaagctttattaactaatttcccaattcttcctggaaaatatcccaacaaatagatagaccaattcagccatgaaaacaaataaatcttttttccatttgcaagcgcaagatctctaaccatataacttgtcctaacgtagttttcatcttgtggaaaaaaaataccactatctgagttatcaactcttagtttaataaattcacataacctaataatacttagcattgaacgttcattttttatgtttggaaaaattgggagtttattagcaatctttactaattgctgataatttcctttactaccttcaccatagatcataggtggtcgaataattgcgagctgaaaattttcgctttgtaacaaagttaatcttttttcggcctgccatttactgtccccataaaaactagaagggtttggttcagtttcgggtgtaattactcttttcttgttgatatttgtttcttccccatagatgataattgaactcatataaataaactgaccaattcgtccgtttaaatcattcttatacttctgagctgtttcaacagctaaatcacaatttactttataataaagttgtttggtctcttcgcttacttttgaaacatcggcatgagctattccggctacatgaaaaacagaatcatatagtgaaaaatctttttctttccagagttctccatgcatatccaatgtatcaatttgatactcatcaccaaactgcttcatccaattctcaaaagaggtgccaatatagctgttcgcgccagttattaaaatccgtttcattcgacatcttccttctttatggttccagtgccaccttcgacgacaccatcacttttaaatacagaggtaatcgttccaaagaaacatttaacatccatcccaaaactaatatgttctgtatagtacccatcaagcttagctttttcttgtatctctaactcatcacgtccactgatttgagccaatcccgttaatcctggacgaatgtcatttgcctcatatttatctcgttcatcaatcaaatcgtattgattccacaatgctggccgcggaccaatcacggccatatcaccttttagaatattaaaaagctgcggcagttcatctaaactagttttccgcaagaatttcccaacttttgtgataaaaaaatcaggattctctaacaaatgagttggcatttctttcggggtatcaactttcatcgtgcgaaatttgtagatattaaaatgacttttatctttgcctactcgtttttgtttgaatataatcggtccttttgaatctactttgattgccagacacaaaatcaataaaattggtgaaagaatgattatccctattaaggacagcaaaaaatcaattcctcgctttaccctgtctttatacacctgatccactcctatttatttgaagcattggcaaaagcaactacatcttttgctagctgtttgtcatcatcagataattgttcaacgaattccatgacttctgctattgaatagccagtgatattgccaacaaaaattttctcaaacacagcttcatcgtttcgttctttatctaatagcagttcttcatagagtttttccccaggacgaatcccggtctcaataatttctatctcatcttcactataaccgctcaatcggatcatatttttagccaaatcaatgattttgactggctcactcatatctaaaataaagatttctccacctttagccaaagcccctgattgaattaccaatcggctggcttccggaatcgtcataaaatagcgcgtcatgcgaaaatccgtgatggtaattggtccgccatttgcgatttgttccctaaacacgggaatcacacttcctctagaacctaacacattcccaaagcggacagccgaaaatttcgtacatcctgcttcatttaatccggtaacgatcatttcggcgattcgtttcgtcgctcccatgacattcggaggattatttgctttgtctgtagaaaccatgacaaagtttttgactttggctgctttagccgcttctgccacatttttagttccgtagacgttgtttttaacggcttctcttggattgtattccatcaatggcacatgtttgtgggccgcagcatgataaacaatttctggttgataatcttccatgattgcaaagattttcttacggtcttggatgtctgcaatgataggaacgatttccgtaacacactctgagtagttgtttcttaattcgcgatcaattaaatagattgagttttctccgtgacccagtaacaatagcctacgagggttgaagcggatgacttgacgacaaatctctgaaccgattgatcccccggcacctgtcactagaatcgtttttcccgtgatttggtctttgatggcatcaatatccaactgaacttcatctcttcccaatagatcaaccacatcgatttcttttaagcgagaaagattgattttccctgaagcgacttcctccatagatggcatactgtttactttcacatgcaatggctcgatcaattcaaagatctcacgcagttttttgcgggaaagcgaaggaatcgcgatagttatcatagcaatttcatacttatcaactagttctggcaagtctttgatagagccaagcactttcttaccagaaagataggtatgtcttttattgggatcatcatcaatgaacccaacgacattgatatccccggcagtctttgatcctaacaagctattatagagaattcggccaccctcgcctgctcctagaattaaggtgttctttacttcttcactaggtatgcaacggctgtttttcttctcgatgtacaagcgccaaactaatcgactagcaatgataaagaacatcgaaagaaagtacgtagagatcaccagacgcatactataattttccttactgaaaaaaagaagaagaatcgttgtaattgaacttaatgtcagcgctaaaaagatagcaatcatttctcgcagattcgtgtaacgattaattctggaaaagacacgaaaaatccagccaaatagccagtataagacaattgaaagaacaattgaaatttgcataaaatccatcggaatcaaaacaaatggtttcataaaataatacgaagcaatattggcaaaaaccaataatatgctgtccactagaatcaacgtggctatttttcttcttcttgttaattcaaacacctcaaaagccccctaaaataacccaaactttttcttttttattgttgtgtattctggataatcgatttgatccccatttatcaaatctttcgccacttgttgcattaaagttactttgtttggttcaaaatctttggcgatctgctcatacgcttccttcatataaaaagtccgtttattgactccatgagcatctgacgctaccatctgaaccaaattgtgttcaaccattattttcgctgttttttgaatgtctttcccaaagactcccatatagcttggagctgtcaattgtgctaagcatcccatgtctaggaatggaagcaaattattcggatcttttctaaaataggcatttcgctctggatgtacgatgactggtgttttgccaaggctctttagttcaaataagacttgttcggaatatgttggtacttccatggtaggaaattctatcaaaatatacgtatcgtccagatccgtaaataaaatctcatcattacgaatatcctcaattaaatctcctgttatccgtacctcttgtccttctaatacggtcaagggcaaatttcgctggtctaattctgattgcaaagaagagaccaacgaaataacgtcagattttggattgtgatatttcccgttgttgtgatgtggcgtacacaggatgtgagtgattccttgactaatggctttttctgccatcgcaatacttgcttccatcgtttcggcaccatcatcgataccaggtaaaatatgacaatgtaaatcaatcatttcgttcgtctcctaattcattaattcccgtaataatagtaatagcctgaatctttgttattctctgctccgttgtagactacccctaatacgcgagcttgcaccatattcaataattcttttgcctttgttaatggctctttgcgggaaacattttcgcgcacaacgagaatcgtcccatccgctttggacgccatgatctgggcgtccgttactgccactactggcggcatatcaaaaatcacgatgtcatagagtttctttgcttccgccatcacttggttcattctagatgatcccaataattccgaagggtttggtggtttaggaccacttggtaaaatggagagattgtcgatcactgtttgttgggctgcctcagctagattcgttgaagtgctcaaaactgtactaacgcccacattattcagtaaattaaacgttttgtggacggtgggtttccgcatatctgcatccactaacaatactcgttgtcctgattttgcaaaaactactgctaagttcgcagatgtggtcgatttgccttcgcctggtcccgaagaagtgacgactaatgtttttatttgttgatccgctgaagacgcaaattgaatattggttcgaatcgtccgatattgttctgaaataggagaagaaggatccactaaagtgatcagacttactgcatgggtttggatccctttacgttcttgttgtttagccatgtctcttcctcctatactctcgaacggctgcgacgagattccgtcgttttgtcattcgttggtttcttcaaagttggtcttgttggtttcttttggatcgtcgcatttaattctttttgcgacatttgaggtacagtccctaaaatcgtatagccaatcgtatcggtaacaaatttgtcgtcttttacggtacgatctaataattcaaataagaaagcaagtccgacaccgaccatcagccccagcactaatccaatagccaaatttaatttattatttggcgataccggtgatgtgctggcaacagcacttgaaatgatggaaattttgtccacattcatgacgtctttggcattttcctgaaagactagtgctgtggtgttggcaattttttgtgcggttacagcatttggattggttgcttggatcgaaaacatttgggaattttgtgactgattgacggcaatcgcatctttgatctctccagccgtcattttgacattgctttctgattccagacgatctttgacttcgttcaatactaagtcactgacgatcatgtctttatacgtattgatcatttgcagattggtattgacatcattgacatttgcggtttccgattgcggcagtgtcacgatcaattgggcttgtgaactatactttggtgtgatcacaaagaacgttgcaattcctgcaagtgccaagccggcaaacatggcaataatgattgaagccaagtgttttcgcaagacttcaaatatctcttttaagctaattgtttcttccatttcttctccactttcttattcattctcaagatttaattgttctttcagttctgtttgaactcgattcagttcttcctcactaacccgttggtaggaaatgccatcttgcatgaagccttcccctttaagttgatcttgtttgatcgttttgaaagcatcccgataatccaatgcaatcgtccgcatattatcaaaactcatatctgtcttcatattgctttcgacagcactcaagatatcttggtatttgctgacgccatcaaagctcaacactttcttagcaattccctcaacgattttgcgttgtcgttcttgacggccataatcgccattgggatcttcatgccgcatacgggaatacgccaatgcttgatcgccatctagagtgatttttccaatcgtgaaatcataattgtcttgactaaaagtcaggtcgttattgacctcaatgcctcccacggcatctaccaattctttcagaccggccatattgattgagatgtaatgatctactggaatatctaaatatttttgcacggtatccatcgacattgcaggaccaccaaatgcataggcatgattgattttgtctttcgtaccatgaccgacaatgtccacataagtatcccgagcaatactaacgatcgttgtttgttgatcttctggactaaccgtcgctaccatcatcgtatctgaacggccttgatcgacacgtcccaagtccccagtatcgatccccatcaatagaactgaaaaggactcttgtttttttaaatcaacaggattttcccgtttcttttcatcttgtgaacgctccactgattcataggtcttttggatcgaaccggatagatccatgtataacttggcgccgattcctaccacaccgatcacgagcactgcaacgattccaaaaataatcaaaaaaatcttttttccttttgacataattattcctccagttggctcttcctatcaataataggattctgaatctgtctctgaactatccgtcatactatctgaatagccatcaccagtcgttgccgtatctgttgtattaccgtaataaccagcatagcccatttgtgaagcaacggtttctgcaagcttggtatatttttctttcaagtctttattgcgaattttgctgatgctgtcaacggctgataagtagttctcgtaggtcactgcatccgtcactttatcgtctttaagcatacgatcaaattctttttgcagttttgtcacgcgatcaagctgcgcatctgcaaaaccaagatattcttttactaatgctgtccatttgtcttcctcgaaaaaattcaaattttcacgaatgctgccaacgtcggtctctttcagatcttttttgatgatgacgtcattttcggctttctgccaattggagacgcctttcgtgaagagcttgtcggttgcttcttggattttttgctttgcttcgatatccttcaactcatcgtcgatggcttgtttctgcttttggatctctttggcttctgccggcaatgcatcctcttcaatgccgtattcttcgccagatactttgatcatggctagctttccgactagctggctgatatcatccgcggaaatgcccgcttttaaaaatgtatgatcctcattaagataaaggcttgcaacctcttttttcagcgatgcaataccgtcggtctcactggcgatcgcggtttgcgcatattctacccgctgctggtattgtcgctgattgttctggcgatatccaaccaaacagatggcaacggctccaacaccgactgccacaacggtcaaagtcttaagtaacggctttcccatgaacacactccctaaattatttgtgctttataaatttatcttttcaatcaagaaaagcaaatttgctcaattctagttaattataagagaaaattgaaattaaataaaggtaatttaccaagtttttacatcattaagaacaatgtttttgcaaaaattgtgatttaacttgaataaaacagcgatttcttttatataaaaaaacactaaaaactatatattttgttatttaatttctgacgatcaattttttcattaaaagaatttcattctctttttcatctttatttaggcattcgttaaggtgtatcccttgtaataaaactagcatcatgaacagcgagaaaaatcacgattttgtttcttaaaggattcttggatgtttgcaattatttttgagtcttttttcaatctagtaattaaataatttaaatagttgaaaaaaccattttttactcatttaattttctatttttaagtgctcgctttgatctgtttttataaaccaccttatttttcaatattctattctttgaaatgggaaggtgtttgttctttttcatctggttttttgccaataagtgactgcaaaagaatggtttattggcaattcatgtcaattttttcaccgtttgatgaaatacgtgatttgttattgcgattctaacttcattaagatagctatagacagattcaattctttaattggaaaatgaaaggagcaaaccagtgagagagcttcagatgaaattcgttacgaatactgcaacgatccgttggatgcgcattctcgacttatttgagttagagccgctttgctctactcgttcactggcaaaggcttcctcaagtacgacgcgaacgattgtgactgatatcacagacatgaagtcccatttcaaggatgccctccatatcgattcgtcccacaagggttatattttcaccgtattgaacccggcgaagtacctcgcagcgaaacgagcactgattactgacgagattcttttccatattgtcgagagtatttttcagcatgaagaaatgcgttcttcagaatgggcagaaaggtatcatatctctgagagtacggttcttcgttacttgagaaaagtacaacctgttcttcgcgactaccacttgcagctagattataacccaatcacattcattggcgatgaaatggatatccgtaaattttttcatgatttttattatgaatcagaaatcacggcacacacgatctttccccctattgcgattcacgacatcaccgtcaaagctttttctgactgccagcgaaccaacaagcaagcctgctcatttggagagctcaattattatttgtacataacccttgagcgctattgcgggggacacacagtgaaactaccaaaaaaaatcagcaaactgttttcaactaaagaagatttcaaagaatttgcggaaatcaatcagcatatctttgaacactaccaacaaagacttccccaagaagagattctctatctctttctgttggtttggagccggcgttcgattaatgacgttactggtgaggaagtcttctgccaaaaatacaatcagtgggcagaaatcactcagctggccaatgattttgtagctacctgtattcctgaaaccaaaaattcctcccgcgatcatatcttgatcgaatctttttttaccgtagctaaaatcaaacagttgctctcccctttgttgaatcataatattgccgatgtcaatctttacgcccagcgcttgtttcctgagtcttatcaaaaatgtcggaattttctcacagaaaatccattagctgttgctacgtggaataaaaagattttattccatttaagtgccagtctgacgatctatttggaatctatcaaatcgctttattggcataccaaaaaaaatgttgctttcttatttgaaggctcatatattctctgtcagtatttaaaaagcaaatcgatgcattacttgcatagctcaaaaaactttttctttcctgattcaaatgaattgtcacctgattatttaatgatgaatcacattgatctcgtggtaacaaattacacagaatatgtttccgattatgctaatgacattgattgtttgatttttaaaactttccctgacaaaaatgactggaataagctagccaaatgtctcaatcctcatatgaatgcttaagagcacttccgattatgacaggggaagtgctcttaagcgtctattgcttccctaattataagacagcaacgccactgagaacgtatcaatactcttttttctggttctttgatacagtttaggtgtatttaagtcgaatcaaatttgggaggatctttcatggagaaaatcattctgatcggaaatggggatgtaggttcgagttacagttttgcattagtcgctcaagggattggcaatgaaattggtattattgatttagataaggcaaaagcagcgggtgacattcaggatttaaatcatggcttggcatatgttggtccaaaaacactatacgttgctgattatgaggattgtcgagatgcagatcttgtagtgatcaccgctggtgcagcacagctgccccatgaaacacgactggatttgacgaaaaagaatgctcagatcatgaaaaagatcgtgaaatctgttattgctagcggttttcaagggatcttcttgattgctagtaatccagtagatgttttgactcactatgtcaaaaaaatcactggctttcccgctcacaaagtgattggttctggaacttctctcgatagtgcgcgcttgatagtgcgcgcttgcgtaatgcgattggcgagcagttgaccattgatccacgggatattcagatttacgtcttaggggaacatggtgatacccaatttccagtctggtcccatggcaatattggtggcttaagtgttcacgagtggctggaaaaacacccaagtttttcggagcaagatctcggcctgattgcagaaaaagtgaaaaatgccgcttatgacatcattgctgccaaaggttcgacacattatgggatagcaatctcgctggctaggatcacccgcagtattttaaaagatgaacatgcagtactgccggtttctgtacacttagagggacagtatcaagcaaccgatgtctgtattagttcccctgcaatcgtcaatagtcaaggcattcgcgaaattattgaaatgcctctcaatgagtccgagcaacaacaaatgtacgattccatccaaacattgaaaacgatgcaggcacagctgcaggaatgaaacgagcttttctagatgatgcttttacccactaaataaaaaagcgtatcttgtccaccatcaatcatgaatgatggtaggattacaagatacgctttttcgtttattagtctagaatcgttacttttacttgacgtcggccccattgcagacatttggctacattatcaaagtggacatcaatgatatttcctttgatcgcgcctcctgtatctagcgctagcgccacgccatatccttcaacattcaccaaggtacctaatgggatcacacttggatcgactgcgaccgccattggattgctgcgaagatctgttccgctggcagtcaggtggctagcacctttctctgcataagaatatgcggttgattccatgatcattgtcttgccgctggaaggtgtgttgctacccgaattgttggagctgttattcgagttgtttgaactattattcgtcgaactgctgctcgtattgcttgaagctgaattgctgcttgaactgctgtttgattgcgcgctctcacttgaagatgacgactcttgacttgagctttcactcgctgcttttgccgctgccttcgcttctttttctttagcttcttgttcggccgcttctttggctgctctttctttagctgctttttcagcagctatccgagcttcttctgcttctttgctggaagcaatctttgctaaggtcgattcgttttctttcaactgtgtctgcaagttggcgatcttactatccaactcttgcgcctgtgcttccaaagaggattgatcctgctgtaaggattctttggtagactcggctttttcttgcagagactctaatttttctttttcagatgtcaacgagtcgattttttctttttctagattttggagcattgtcatggcgtaagcccggttgatgaaatcttggatattggaagattccaacaagactgtccaatctctggttactccaccgttgacttgaatgtctttcattcgttctgcaactacagcttcacgtttttcaatcgtttcttgagttgcctttatttcttctttggtttgtgccaacgtttcttcattgttagcgatttgtgcttttaatgcttcaacctcgctgtatttattattgacatcggtcaaagcgatttgtacttctgtactgatttgctgactttgctgcataacggcactttctttctctttcaatgattccagagattcagcctgcgcaaagatcggcgaaacgatacctgccgcaaagactgcgacgaccatggtacgtaatttctttgccttcaaaaaaattccctcacttctcactaaggtttccaacgcttattattatacaaattctgggggcaagatatattgcaactcttttacaatttattacaatttttagccaaagtgggagaaataagagtctattaaaaaataattcacgtgaaagtgggaaatcagagccttgaaaaggctttttttattgtaatacttttgtaatattactctctcttcttacgtaattcttccacaaaccgccgtaagtcttgaacattggcaatctcattgatttgcagtttttgaaagttttttaaaagtcttcgctgatgaaaattcagcttcggtaacgtttcacgcaattgctgccaatcgattggcagttcagaaatacgttcctgccaattgtttttcttttgttccaaactttctgataaagtggctttctgctgttcaatagcacggtccagtcgttgaaccgttcgttgaaaagcagcaagattagccaatgtatagcccatatccaacgacatcgccatcaacaatccaacaggtagataaaaactgaatctttcagccaacatttggacaatgatcaacatttgcggatgaacaatgcggacgatcaagacacagcaaatgccccaaaagattgaaattgggacagccacgcgaccattgatattcaaaaaaacattgtggtaatcccaccatgaagcatgaaacagtttttctaataaaaagctcgtcacgtactctaataaggtcactaaaacagctgctgcaaaaaagagcagcagcaattggttatgtaacggtcgcagtaaatacaagacacctaaaattccaaagccataaataggagtgatcggtcctaccaaaaatcctcgataaacaaaatgtctggcttttatcgagcagtaaaccgtttcccacagccaccccacaaaagaatacaagaaaaacagcaaaacgatctgagtaaattcagtcatggaaatctctcctaacgaatggtaaataacttttttggaaaagcattataaaagagcaatataatagtagaaaacttttctttcttattccagtatacgcttcgtttgtcgttaaagaaaagatttgcgttaatctgatcgagtcatctgccctttccaaaaaggatcgagggatgtcctgtatctgttaaattgtaaccgcacaattcttttgtataggtgctatgatctagttcgatattctcgatgatttcttcctctgaaaaaccttggaaatcaaattcgctgatatagcttcgcaaaaggaccaatttggcatcgagtaagatgatttgttgtacacttgtccagaaatcttcctcagattcttcgcgaacaattctttctacttctgcttccgtcacttgccagtaactatggaccaatggcagacgttccttcatcactgcaaaatcaatattcccacgcatctttcgcaaatactctttgacatctggataaaacatccactcacctctgttttctagcatttccctgcttaggagactatcaatggataatcgacagctaacaaaaagttctgattgccaatgacagcacaagtgtacctttccgacaataatcatcctgagcagcgagggatgcattcactttttatatagcatagcaaatgatttgtgggttttataatcaatttttgcatcatgtaaggaaaaatgtgtacaatctcctatactatccagacttagccagcagataaacgaaacttgaatttttaaaattcgataaactactttcaatagtgctcatttagaaagattcttctattgccttatttacgagcttattataggataaataaaataagttttttaaaaaaactagaaggagtaaaaaaatgaaaaagcacatggttttaggtttagttgggtttgggttatttttagcaggatgtacagaaaaaccatcgggattggttgattcttccacaaaagaaaaagagcgtacacaattttcttccactgtaggatcttctgaaacagccagcactggcacttcagaaaatgtgattcctgttgagaagcagacgatcactggtgtaagcggttattcctattcgctggaactgccgacaaattggcaaactgtagccgattttgagtcactaaatccagataatgattttatgctttctgattcgttacaaacaaaatttctggcggctgttgtggagtctaaacaagactttgcagatttcgacagttatcttgcattggttcaagacagtttagcatcgaattttggtaccaacgcgacatttttaccggttcctggtactcaaacccaaatggttgattttgctgcaactgtagaagggttgaacatacattacttatattatgtaacagaaaccgacaataattatgttcaattatatggttggaccttagcaagtctttttgattcctcaaaagatgaactaacaaagatcatggatagtttccaagagagccctcaataaaggcatgattgcagaacagccgttgctttaaactcaaacgaaagaaggagatcaacacaaaaattgtgcggtctccttccttcgtttggaaattttttacatccgattttttctcatatttcttttatctggcagctattcgagtattgccctcttgtgccttcatcattgtactttcatcttaatgtttctatctattgcctattattagggtcatttgctgacgatcaatcgttgtcccataaaaatcaatgagccgctgatattgttccattgcatcagctgattgattgagaccccatagctctgtgcaatcccccataaggtatctcctgattttacggtatatgtcttagaactagaggtactgctgacttctttcacataggcaccactgacccagcctttgccttccacccgataccaggtactattgccattaacactggttccttgtttttgggccactgccttaaaagtcgcattgttggctaatgaccctacgacactagcactggttgaagcatctgaacgaatattcagcgctgccgtggtcttgaattgcttgttgatggtttgctctgaattattgctgttattgttggaccctgcctcagtaacatacgcggcgctgacccagcctttgccttccacccgataccaggtactattgccattaacactggttccttgtttttgggctactgccttaaaagtcgcattgttcgctaatgaccctacgacactagcactagttgatggattggaacggatattcaaaactgccgtggtcttgaattgcttgttgatggtttgctctgaattattgctgttattgttggatcctacttccatcacatacgcagcgctgacccagcctttgccttccacccgataccaagtactgttgccattaacactggttccttgtttttgggccactgctttgaaggtcgtattattggctaatgaccccactacactggcactggttgaagcatctgaacgaatattcagcgctgccatggtcttgaattgcttattgatcgtttgttctgaattattggtgttgttgccattcccgctgccgccaccggtcgcggaatcaaattgtgtcaaattgtaggtttcgatcaaattattcagcttgccggcataagtcgtatctgtcgcataccttccttgaagccattgtgtggcatcacgataggaagaggtattggatttccaagccccactgtaaaaataaacgcctggtgaaaaagaagtcgtttttaagacatgggcattatcttcaaatgattcctttaaagacggatatttgcggaattttgcaacgatctcataaagattgccgttgccatcatcttccattgttcgcatctcaacatattgaccattgtatgaacctttgatcccaaacatattgtttgcttgcgtcgtaagtgtggattgtccccatcctgattcaaggatcgcttgtgctatcatgacggaggcataaagatcgttgacacttgctacttgttgcgccattggtcctacttgctggatgaaggcttgttgtgtattagatcttgccatcacacgatcgatattaggcataatctttgtttctaatgcaattcgctctgcctctgacaacattgggatctcacttgacgattctgcagaatcaacgtcactggcaggctccgttcctagaggttcttctgaagactcgctggttgctgactcatttgatgatactgtggaatctgtgtcctcagtcaacgatgtttcggttccagtatcctcggtggttgttgcttgactcgcttgtgattcatttactaaatcgtgtaaatcggctgtatcatccgacgaagctaccgtagactgttcaaccacttgtacacccgtgtcattcgattcttcaacagaagttgcgagcacactaaccggtactaaattcagcgaactaacgagagcggtagtggtagctgctccttttcggtacaattgactgcgtttttgccgttgcaactctttgtggatctgttttctgcttttcatttttctctccttctactagcgctgattcattctgcccattgggttcaatgagaatcagtccactggatcaagtgtttataaagataaaataattaattgactctaactgcaaagctcggagtgtagtatgctgtattccccacagaaactgtctgtcctggacgaggggcatgaatgtactggttgcctcctaaagagatggcttcatggtgggtactgccggcagcaccccagaacagtaagtcaccagcttgcgcttgactaacagaaatcattgtaccagcagtttcttgcggtactgtccagccaccgatatcttttccggttacttgtaaatagacataacgggtaaatcctgaacagtcaaaactatctggtccttttgctccccagacatacggcttattgagatgattgtaagcttctgctacgatcgcagctccaacgttcccaattggcgcagatggtgtcggaggtgcaggctcagagctaggagcaggctgaggagcaggatttctgctgctttccgtacttgctgccttcgaagaagaatctggagtagttacggggcttgtttcattatttgttggtgtttcttggatatccccttgaacatcagtggattctccttgagcagaacgttcggtttcagaagaatcagcttcagaaatcgaagaattttcagaagactcggtagtcgttggtatgagctgatcttcagctgctgcctgctgtcttgctgcgacccgctctgattcttctcttattcgagtttgttctgcctcataggcttctttttgagcgagcaatgcttccttttcactttctttatttgcttgccgtaaagaaaggtttgtctgcaagacattcagatctgcttgcttggacgccagcttcctttttgggcttccagctggccttgcatttgctgcatttccgccattttggtttctgcttcatttttctttttcttaacagctgcttggtccgcttgttgctgttggatcatctgattattggcattgacgatcgtcgtcattccgtggaaccgctgaacaaagtcaccgaaagattcggaatccaaaagcacggaaataaagcgatcacttttcccattgacttgagtgtctcgtgcttgattctggatcgctacttgtagtttctcgatccgtgcttccaaatcagtcaactctttttctaaatcattgatttcattccctagttttttctgctgagcgattaattcagctgcttgttcattgatgtcagacacttcatttgttaactgatctatttgtgtctgcaccgattgatgctgttgtttcaattcagctacttcgttatttttttgctgaatcaattgatcgtaatcatcggcgaacacggcggttgggatgacaggacttgtcagcgctattgcacaaatgcacaaagatgatgcaagtttctttttcattttctcctccaattcgtcaatttcaatcatcaaattacatttatttgacatttatcattttaacatactcctattcacaacccaattgatttcccgtttacattttcattacaagtgaaatcacttgttttttaattctcgatagtttcttaaaaaacactcaaccttccattatgatcacttttcgaaaagacatctaagttgatgagtttatgaaatcaagcagtatctgtaagatacaaaccgttcttgatttcaaaaagattacaaagccgtagaaaaaaagccgtaaaaaaaagccgtaacaaaagaattcactacaaaaaagtccagagatcgttcgatctcaatcgaacttgagaaaggctatttctccattttttgtattatcttctatcacagcttctaaaaacttttattggtacggcaacagtgttcgcatcacttgaatttgatgatcgatttgttcttcttgaatatgacccgtcaaagctaaaatacccagaccttctataacaaacatatagttttccgcgattgcttccagattccgatcggcaatcacaccttgcgcgaccccaacttgaaaaatctcttggatcgtgcgtttcgtctcagtcaactgcgtttgctgcaacgaactcgtctcaattgacttatgcgtataataatactcatacgtcgctcgcagcatgctgtcggatatgctatgaagcaatcggtatttatgatcctcaaaatatttcgtcaagatagtctcgaaagaagcatttgctttgatcattgctcgaacttcattaaaccgtcgttgcgaacgttgttgcagcacttctaagaaaatcgcatccaccgattgaaagtacagatagatcccgccgcgactgatgccgcattcttcgatgatgtcttgcatcgtcgcatcgatcaatcctttcttgctgaatactactttggcactttccaaaatcgcttctcgtttttgccgttttttttcttcgatcggctttttcatgcttccacctcactttattaatgacacctgtgtcattttattgtataatcatcctaacataaaaatgacacgagtgtcattctataagaaagggtgttttctcatgaacacaaaaaacaaaacgtatcgtttagtgatccgtgcaattctaaccgcaatcattattttacaaacgatggtgcctttccttggctttattcctatcggcatcactagtctgacgatcattcatatcacggtcattgttgctgccattgttttaggaacgaaagatgggatgtttatcggcttggtttgggggattttcacgattattcgggcattcacttcccctacgacccctttggatatcacagtattcactaatccgatcatctcagtcctgccaagggtcttagtaggtctcgtcgctggtatattgtttacttggctctatcgtaaaacaaagaaagtcgtccttgcttcaattgttgcagccatctttggtacccttaccaacacggttctcgtgttaacgttgatgggaaccctgtacactagtttggtggccactacctatggtgttgatgcttctgctttgtttgtcacattaggagctattgcagtgactaacggcgtttctgaagtgatcacagcagtgatcctgacaccaatattagtcaaagcgcttttcgcagccaccagtttacgtccagaaaaccgctgagtaaaagtccgattcttttaggtttgtatcgttagctttatcctatcattttttacgacaagtgcaaacttgtcctctcatttaacaaatgaaatcaacaaaaaaacctctcactagcaacggttccatcatttaatggaacacgtaactgtgagaggtcattttgattatctttcaaaaatcagaaaaaagttgctatcaatgcaaggattgctaaaccgccttgtgtcaatataatttttttgtcactagtgatgctgccatacagagcaactaaaatgatataaatcaaaagcaggcgactcaattcgacaggagaagcggaaagaaacacgctatagagcaagccgatgccgattaacccattatagattccttgatttttgaacaatgtattcagtgaagggcgttctaattcttcttttgataaattgaaaacccgttgcgttctctttgaagtagtcgcaaaagtttccaaatacatgataaatagaaattcaagtgcaacgaacatgattaaacctatagtaatagtggacattttgcttcctccttttttaaatctggttttctttattataaagtaaaccaagcaatcttccgtccttcatgcttctagcgaacacaaagacaaacggaagaccacatagaaagtaagagtagatttatttaaatgtcgtgattttttctgcatccaaacgaatggattcatagcctaattcttcagctttaccaattgatagaatcataactggaacgtagcgttctggatcgacatcaaaagcctctgctaattggtctgcttcaaagccaccaattggattcgtttcgtagccatgggcacgcgcgactaacatcagctgcattgccgctaagctggcgtcaacttttacgatggaggtcatttgatctttcgtgaagctcttgtagtaaggaatgatcgtagccaattgttggtctctgacgtctgccggcatttttcctgcttcaactgcttgattgtaaatttcttccccgtattcataacaagctaaatcaccaaaaatcaagatcatggctgccgatgtgtcgttttggcgtgtgttgaagcggatcagtggttttagttttgctttttgctcagcactttcaacaacaacgaaacgccatggttgcatgttaacagatgagggggcagtcgttgcttcttgaatcatcgttaacatttcctcatgagagattttgaccgtctcatcatagacacggacggattttcttccaaaagtgatagctgaaaaatcgttgtttactctattggttgacatattagtagcctctttcatttcattaatttattcaacaactgcaaaaacgcagctgcttcttcttcggtcagcgatagggcgaatgcttccttctcttggtgtttctcgcaagcagacagctcttgtttggctttaggtgttatttccacaaagacttcacgattgttgtctttgttcctttcccgcactacataattcttttgttctaaaatttttagatgtcttgtaactgctgcactatcgatcttcaattcagtctgtaagtcagattgcgaacaacgtccattttctttgatgaacatcattaattcatatcgggtcagactgaacccggtgcttttttcaaaagttgtcgtcaattcttgattggcaattttcaactgataaagcaggcggctgatttctcttagctgcatggaatactcctctctaacaattgactcatcaatcgttgactcgtcaataataactttttttcttacttttgtaaataatttcctgcgatagacaaaaagcaaacaaaaaaaccaacatcatcgttggttttcttgctgtttttttcacttcaactgaaaggctttttttaatcccattacaaccagtgtggaaagactagccgctaagaaaatgattccccatgtgccaacttgcaatggtgaagtccctaataattcattcatgaaagggagataaacagctgacaactgcaatcccatcgaaaggatcagtgcgccgatcaacggtttattcttgaagaaagacttgtctaatccaaatccgctttgcttgcgaacattaaaaatatgcatcagttgtgcgatcgccataaaggtaaacgtagcggtctgggcataagctaattcatgatttgtttgtatcaaaaaactaaaaaaaccaaatgccgtcaatccgatcactatcccgcttaaaataattcgacctaagaatcgtttattgaccaaactgtcttctttggaacgaggctgacgtttcatcaggtcctcttctgcaggttcaaaggccaacgccatcgcaggagcgatatcgatcactagattcaagaacaaaatatgcagcggttgaatcggcatgggaagaagaaaaatgacacttagaaagattgtcacgatttcgaccatattacaagaaaaaaggaaagaaacgtattttttgatattgtcaaagatgattcttccttctttgattgcgtcgacgatcgtcccaaagcgatcatcagtcaagatcatatcagaagattccttagctacttccgtgccgcgaatgcccatcgcgatcccaatatcggcaccattaagagcaggagcgtcattcacgccatcaccggtcatcgacacgatctctccttcttcccgcagtgctttgactagttgaagtttattttccggcgaaacccgagcaaatacagccacttcttcgatccgttcattaaacgcttctttacctgccaaggcgtcgatctcttttcccgtcatcgtcttatcaaaatcgatcaaaccaatttcttgtgcgatcatggaggcagtttgcgggtgatcacctgtgatcattttgacacgaatccccgcttcttgagcgactttgacagcttctttaacatctgttcgtgggggatcaatgatgccaacaaaaccttggatctctaaattatccaatgattctgtcagctcagactccgacaaaccaccctgatagttactgatttgtgccaccgcaatcactcgttgcccattggaagctagtgtatgattgatgtcgttcaactgctctttcacagacggatcgacggcagctttctcgatcaaaacatccggtgcacctttcatgatcaacgttcgctgttctttttcatagacggtgatcataaatttgttttctgagtcaaaaggaagctcagcgattttttcaatgccttgatccatcagtgtttgacgatcgatgccttctttttttcctaatacaacaaacgctccatcggttggatctcctaggacctcaaactggccatccgtttctttcaaagaagcggacgtacatagtgcaccgttttcaatcatcgcttgaagtgctggctcttcattaactgagatttcttgtccttctttatggaagctccccgtcggttcgtacccattaccggtcacagtgtattgctctccattacttagaatgatctcagcgatcgtcatctgattttctgtcaatgtcccggttttatcactggcaatgatactcgtagcgcccaaagtctcaaccgctgagagggttttgactaatgctttgtgttcagccatgatccgcatgccgcgagaaagagtaatggttgagacagcgggcattgcttctggaatggctgctactgcaaggataatcgagatatgcagcatttctaccaaaggctgatccgttagaagacctgcaattaggaccgtcacggcggcaaagagtgccgcaataatgatagctttccctaatttatccagctcgatatccaaaggcgttttcgcgcttttgtttccagtcagcatatcgctgatttttccgacttccgttttcatcccggtggctgtaacgacggcatagccatttcctcttgtcactgctgttcctgcaaaaacaacattgcggcgatcacctaaagggacgtcttcatcatattgttctgccgcatttttttcgacagcttcggactcgcccgtcaatgcggactcaatacaggctaaattgcggctttccagcaaacgtgcatcggcagcgatcgcatcaccttctgccaaaacgagaatatcccctggaacgatcgcagcagattcgacttccatcacttgcccatcacgaatcacttttgcggtagtgtaaatcatttcctgaagggaatcaattgacttctgtgcacgcaactctgtcacaaaaccagtcatcacggcaattaccaccgcaatcaacacagcaattccttctatcgtttctcccatcgcaaaagagagcaatgcggcggctagtaataaataaacgatcagattatttaaattgtgccataacaatttccaaggggaggtcgattcttgttgctgaatcgtattttcaccataggtatctagcgcctcttttgcgccttgcttactaagccctttcgtctgatctgaatgaaagtattcaagtgtttctgttggtgttcgctgataaaaattttccatctattctcctccttgtataagtatcttctatgtctatagctctgtttttatagtgagattttgtccatgacaaattatggcttcaagtaaagttgtgtcacttgtgcttggagtcagggcgtatgattgacaaaacggaaaaatcaagcaaggattgcttctttcgtatgttgtgagggtgtctgtaatcttgatcgaatgcgaatacagatgggaaaacgcctccacaagttttttacgagttgattggaacacagcaattgaaaatcattggttttagaaagggagatctgggtacttcgtaaaagggtgtctgcagataaggatgtttactttgtgaaaaaaccatctttccatctttaagttatcatggattaaaagacaggtaaattattttgcttgaaaaatatcaatatcattaagataaagaacaaaatttatgtaaatttgaatttaaaataaagagaatcaagatttccgatttcttttcacaaataaatctgatagagcaatccctttccttgtgaaataaataaaaaataacaactttttttaataagaaatttctttcgctcgcgcttttccacctgaatttattcgttttaagtcaacccaattcaatccaagtcaacccagaaaaagaagtgatcctcttgaagaaatcagcttgccgcaagtattcatttgaaatactatgaacgggtttgagagtagcagaagatcatttaaccccagatatttatcatctagaggaaaactaaccactgcttagtaaaaaaaccaattcctttgaggtcttcttcccctcatggaatcggtttttttacctgttcttgctgctgtctttctgtctctaagtaaatatatgtttttttcggagctaataccgtgcgaatttcttgttccaattgatcgatcacctcatagtcactcgaagttgctttaggagaaatcgtcaattcagcaacgatcagtaattcatctggacctaaatgcagagtacgcaggtcaatcacttcagctacttccctagatgataatacttgacgaattttttttagatcacttttcgaagcactctctccgatcaataaactataaaattctttccctaaaaaaccagctacgatcactagaaggaccccaccaatgacgccccctaaagaatcaaagatggggttgttggtgattgctgtcaataaaatacccaccaatgcaatgctcacactgatcaatgcaaacaagtcttctgtaaagcctaaaaggatctcgctctctcggctttctttcaaaaaagcgatcaacggctgtttatccgtgttttgctctttgatttcttgccttccactttggactgctgaactttcaataaaaaaaccagcaaaaagaatggctgcaactagttggatgttctccacttcgtgggtaggatccaaaagatcctgacttgcctccatgattgccaacaggccgccaccgaaaaagaccgtcattgccacaaccgtactaaaaaaatacgtcgcgcgcccctcaccaaattggtaaagttcacttcggccgcgccgtgctcgtttttcgccgattgctagtaatccctgattgagacaatcaatgacactatgaatactttcattcatcaacaccgcactgccgctgaaaagaaatccaatgattttgaccactgctgcaataatatgcgtgactaagacaatccctcgtgcctgtcgtttttcttgatcggcctctttcattttctatgtctccgttctgtccacttttatcaagtgtttccttctgcttatttaagaatagcaccttccaatagaggaggaaaacaattgcgcttagcgctgacgagacccagaaatagaatttaacttttttaatacaaaaaaagagacaagtgagcgttgcattctccttcgaaagctggctacaagtgagaggattgcgacagtaactgtcattctctggcttgtcgttccgagtgaatcgcgttgcttttttgtctctggttgattctgtattcatttgttccatgcttgttcgtgccgagaggcaatggtggtcaagcattggtgatgggcatcgtcgccgctagtcgatatatttttctaaatgatgaatcaactgtgtggcttgctctttagatggcgagagaatcaataatacatcaaagccagccatcgtggcaacaatcccttcaagatccatttcatctagataattcgcaataacatctgccccattgctgacagtatggatcactgtgatgaactccacttgttcaattgatttcaagtattcattcatcgatagcttcagcttttcggtcacatctgcttccgccgtagcaatcatcgtatacttcgttttgccttctttcgtataagtttttgcgatattcaactcccgcatatctcttgaaatggtcgcttgtgtggaacacacgccttgttcgttcaataagcgcatcaattcttcttgtgtctctacttcttggttgaggatcaaacgcttgataatcgcttgtcgctggtttttcttcaaaatgatcacctgcttctactctatccattatctgcggatacgtcatgtatccgcattcaaaaaattatcactgatggacactcgagtcatttaaaagtaagcgagatcgatcatccgtaaatcagctgcttgccacagtagttgtttggaaaatcgatcccaccctttaatgattgtcgtcacagtgcttttattattcatctaattggaaaaacgcatcatcgataaatatcaattctttatattggtaggaaatttttttctgattgatcaattgtttcagcacttgactaaccgtttctctcgtcgtaccgctgaatttcgcaagatcgttgatcatgatcggataaggaatataccaagactcatctagctttccatgctttttcataaggatcgctagtgtattgatgacacgatcatgggcactggaagtaatacagtattgcattctggtcacttgctgttccagtactcgaccttgtttcttaacgatcattttcaataattctcgatccgctaccatcaattgttccaaaacagcagttgccacatacgcgacttcgatctctgtcaccgcaatggcagaaaagtcataacacgctgcttcaaaaaggccatttaccggaaacagttcaccttcactgatgaaatccgtataaaagaaagaatcggtttgatcatttttttcgatacgaatcagtccgctacatagaacaaaaatacgatcacgcaaatctccatcgttgaatagaatctgccctttaggaaaggttcggtaatacatattttcttccaatcgttccctgttttcttgcgtcagcacttttagacaatcaaaattgtcttttacgtattctcgcatgtttccactaatatccatcactccaatactttgtttgccagttaatcagaaatgatacgagtccctgtttcgtgatcaaaatcagctagatcttctaacgaggtaatgatcgcaacattgtttttgctaacctgcacaaaatccatcgctgcttgaacttttggcaacatacttcctggcgcaaagtgaccttcctggatgtattgttccagttctgtcaaattgacttggtctaaccattgctcattgtcttttccatagtttaaggcaattttagagacacctgtcaaaataatcaactcttcagcctccaagacctctgccagtttttctgaagcaaaatctttgtcgatcacggcttcgactccttgtcctgattcagtaacgggtatccctccgccacctgcacaaatgacaataaaatcgttgtcgaccaatgcacgaatgctggcttggtcatggattgtgatcggtttcgggctggcaacgactttgcgccaaccgcgaccggcatcttctttaaagatcgcattggtttctgtcatcatctgctgggcttgctcttcagtcaagaaaggtcctactggttttgtcggatcggcaaatgctggatccttttcactgactactacttgagtgaccagcgttgctacctttgttggtaagccttctgctgctaattcttcttctaatgcattctgcaaccaataaccgatacttccctgagtcatagccacacaggtatctaatggcatcgcaggatttttgggagagtttgctgcttgttgctgtaataagagattcccaacttgcggtccatttccatgggtgatcactacttggatctcttgtttgatcaaagatactaaatgtttggctgtttgtctaagcgcctgttgctgccctcttgcgctaggatcatcggtcaagatcgcatttccacctaatgcgatgactactgttcttttattcgtcatggtatccctcgtcctctcacactcttggaataaatagatttcctaaagtagcggccatgattgctttgatcgaatgcatccgattttcagcctcttcaaattgacggccatatttgctgcggaagacttcatcagtgatctccatttctttgatcccgaattcttcttcgattttctttccgtagacagtattcgtatcatggaaggcaggcaagcaatgtaaaacaatcaagcggtcgtctggtgtacctgtcgctttgatcaaatccatattgatttgatagtcttttagcaaattgacccgttcggtgaacttgtcttcttcacccattgatacccacacgtccgtataaaggacattcgcaccacgaacaccttcagcagtgtcatctgtgatcatcaattggctgccagattctttggcaaattcattggcataacgaacgacatcgtcttctgggaataaggatttaggtgcgcagattcgaacattgaccccaagaatcgcaccagtaactaacaagctattcgccatattgttacggccatctcccacatacaccaacgtgatgtctttcaacgtgccaaagttctctttgatcgtcatgaaatcagcgatcatttgggttggatgccattcatctgttaatccgttccatacaggaacaccagaatacttcgctaaatcttcgacgacttgctggctgaagccgcggaattcgattccgtcaaacatactgcctaacactttcgcggtgtcttcaacagattcttttttacctagctgaatgtcattggcgcccaagaattctgggtgagcacctagatcgatggcagctgtcgtaaaggccgcccgtgtacgagtcgatgttttttcaaagagcaaggcaatattttttccttctaaatagcggtgcgggatattttttttcttgagcccttttaagtgaatcgaaaagtcaatcagatactcgatttcttctttcgtaaaatctttttctgctaataaacttcttccttgaaatacttgttccattattcattcctcctatgataccgttagtctttatttttgtaaatttcaggttgctcaaagatcttctctgataaatggcatgctcatacaacgagggccgccacgtccgcgaacgagttcacttcctgggatgtaattaagtttgacccctgcttcgactagtttttcattcgtaatcaagttccggtcatagacgactacttctcctggtgcaatcgtcaacgtgttcgaaccatcattccattgttctctggcagctgctgtgatatctccacctccgcaacgaatgagttccactgcatctaaatcaagatagcggcaaagaatccgttccaatgtttctttttcttcatagattttgatttggtcattttgtttggagatggaataaaccgttaactcgccttcgatttccggatggatagtgaacttgtcataatccaccattgtaaagaccgtatccaaatgcatgaatttacgctcttcaccgatattgaaagctagcacatgttcaaaagtcggttctttctcaaataattttttcgccaatttttcaattgaagcgacatctgtacgttgcgaaatcccaacagctaacacttttgatgacaagactaattcatcgccaccttcgattcgtgtggattcatcccgattgtataaaagatgctcggcttcttttttgaaaattggatgatagttaaagatatacttgccgtacaatgtttctcttcgtctcgtttctgaatacattcggttcaaggaaacactatttccgatcgtagcaaatggatcgcgggtaaagtacaagttcggcattggatcgatcagaaacggatactgatcgtctacaagatcggtcagattctgatggccagcgatcttcatttcattttttctcaatcctgccatcgttcggtcgatcagttcacgattatcagagatcgatagtaaatattcttcaatcactttgcgggtgttttcactttggatgtttgcttcctgcaagtattctgcaacaaattgttccttgagtcctgtagaggtcaaagattcagctgctaaatcttccaaataaagcacatcaacccctttatttcgcaatgtttcggcaaagaaatcatgttctttttgcgcttgctgtaaaaaaggaatatcatcaaacagcaattgttccaaataatccggcattaaattttccaattcttttcctggacgatgaagcatcacttgttttaatcgtccaatctctgaaaaaacgtgaataggttcattcattttttcatcctcctcattcctatacaatttgtttccctttttctatgaaactttttttaaatagtctgagagtaatctcaaaccagtttctagcgtctctttcttacagcaataacctaagcgggcgtgccctggtaccccaaaagctgttcccggaacaagcaagaccccagtttcttctaatagatccacacagaattgatagtcctcttgttggatcttcaacttgataaatgccgtagaaacataatggggaacgattaattccactttcggttcttggtctacccactgcttgacaatggcaagattctctgcgaccattttcttgtttcgtgcgataatctgctctttgttttccaatacttgaatcgctatttcatcagcgataacaccgccacaaatcatcgtataatctcggtatttacgaaaatgttccgtgagttcttcactagcggcagtccaaccgatacgaatgcctggcgttgagtaggtttttgacaaagagttggtagcaattcccttctcatagcaatcgacgatggaacaaaatgtgccttcttctgttaatggtgcatagacttcgtctactaaaatgtaggcatccgcttctttagcgatggcgacaatctgctgtaattgctcttgatcaaatagcgtaccggtggggttattcgcgttatttaagcagatcatttttgtttcaggtttcactttggctttcaaaactgctagatcaagctgccagtttgcttgatttaattcaacaaagtctacttctgccccaaatgcttttggcaaatcatagagttgctgatacgttggccgcatggagacaacatgatccccgctttcgatcaaagcgaatagtgccaggaaatttgctcctgtagctccgtttgtctgtaaaatattcgctggtgtcatgtgttggtataatgaagcgacgagttctttgaatcgatccgatccttcgatccagccataatctaaaggctgctgcgcgacacgtttcaaaaaatctgtactcgttttgccactgaaggccatgatttcctctagcgtcagtgcttcgatagaactttgggcaatgtcataggttgcttttttctcccagatattcaaccattcctcgacaccaaaattagcaatatccataatcaacccccttatactgagatcattccagtagcgattgctacgatcgacaatactgctgctaaactgaccacagccatgaccattttttgcctattgctgatttgatagttgttctctttacatgcccgtaagtagaaatagaatcctggtaaataggcgatgctgcataagagaacataggcaaagcctgctaatgtgatcccaataatctgaaaggccgttgcgactgcaccaataaacaattgtttattgtctttttgctgataggaataaatcatttgatagatccccacgagcaagtaacaaatcaaaatcgctgcggtacacattgaataagcaaattgatacgcgtaatcggtcacaaggaacgttaacaagaacacgttcgtcaatgcagcagtgataaacaatgaataacttggtgcttgttttcgattgaccttgccccaactttttggcagcatcccatcgcgggacatcaataaggttgtttctactggtaacatcgtccatgacagccagcaaccaatgatggaaatgatcagaccgatattgataaaggctgcaccccactctccaaccatatagcgcaaaatgttggccattgctggttgtggtaacgccatcaattcagcttgcgacatgacgccgtatggcaataaggaagctagcacatagatgactagcaaggaaagcaaaccgatgactgatgctttttgggcatccgaccgtttttccgcacgattggctaaaacacttgccccttcaatcccaacaaagacccacatcatcaccattagacaacctttgatctgtgaccagagactgacagaagcaccactttgtagtgagctgctgacatttccccagaaatctgctgagaaaatatcgacatgaaaactaaccagtgcgataaccataaataaaaacaaaggaactaatttacagatcgtaacaattgtgttgataaatgaagcgctctcaattccgttattcaccagaaaggtcaatacccaaataaaaacacttgctagtaagattgacggaatgttttgtcctcccttgaatgcgggtataaattcaccaattgcactcatgagcattgtcgcaaaggcgacgtttcccagccaggcagagagccaatagccccagccactgataaaacctcctaatttcccaaatgccgcttctgcatacccaaaaataccgccgtctaaatctggtcgtttggcgcctaaattattcaatgataaaactaatgcaagaatgccaattccgacgatgatccaggcgatgattgcaggtccaggagcagcggacatcgctaagtcattcgtgataccgaagattccactaccaatggatgaactgactactaaggcaatcaagccgattttactgattcctcttttcttttccattgttctccaactttctttagtattgtgtagtaacttgcataaatcccacttgcaaaaaaaatcacaaaaagcattaaaaccaatctagctaaatgaaatactctctcgcctctttccttttatttattgattttttcagctgaaatcaatcactcttcttcctgataaataacaattatttatcaggtacatgtatatgataacgagttaaaaacgcttacattgtggttcagttatcatttccaatgccaaaaaattggcattattcatccgtaatgaataatcgcttttatcctctttttttacccatttttttctcctctagctcataatcattcagatatttttttctaagaatttcattagaaaaattgaatagtgtctattttttgaagaaaatcaatcaatttcgagcgaaagaaaaaagcagcacactactcaaacattcatgcatttaatgtatacggccccttacaagcgctcttacggggacaaaaaaaagaaacgccgcagcgtttctttttttattatttcctattataaaagaacatcatttcattaatagttggtacttgtctccgtagtcgtcccttgattttctggtgtcatttcatctgatctacccaatgcttttagcatatcattacggatctcattataggagtaatcttgaatataaacgattgattggccatcataagattcaccatcataccattcataagtatgtttatcgatagtaaaaccagaaagcatattcccagctagtgaaaccaagtcttcaaacttaaagttggtattgacattgtcactgacagagtcaagaatctcctgatattttgtgacattattgattttcaatgcttgactaatggctgcttcaatgacttcttgctgtcgattgccacggtccacgtcagtatccattttacggattcgagcaaaaatcaatgcttgctctccattcaacgactgtcggccctttggaatcagtgttttaccagaattgtccgaagtatacttttcattaatgtcataaggaacatctacggtaacaccgccgattgcatcaatgatcttctcaaaacttgtaaaattgatattgacataataatcaattggcaagttcaaatagttttgcaccgtttcaatcgttgcatcttcctcaccaatcgcaaatgcactattgatttttgccgtgttgacgaccgtcccgtttccggtaccatcgtagatatttgtccaaatatctcgaggtaaactcaccatgtcgatctttttattttcgccatcatagaccatatagatcaaactgtctgctcgagtcgtatccagatgctctttcttttctcgttcggcatcattgtcgacccccattaacaggatcccaaatttagaatcaacatttgctgatttcaatgaattgtctttttctttattggatttgatcacagcggattctttaaacattttatccacagaattttttgcagcataatacgtatatcctgcaaataaaaagactcctgcaatcgcaaaaagtacgacgcctcctatgattcggcgcttattacgagctttgcgggcccgctgtttgctaaatttcgactttctatccatagtgcctccttcatgtttcctacttcactctccccgattgtaccagattttgttttcagcgcctatttttttaagatattttatatttttgctgtgaatttttatgctaatgcaaatttgttcgaaaaaattttcctatgatttttccttgaaaaaatctaaaaagatcatagccaagtaaagtatcatacgcagtatttatcgtataattatcaaaaaaattgaaaactaattgtttgtttctgaaataaaaatgaaactttcttttctttcttgattgctccccctcagtttggaactatggtaagatatgctagaaacgaaagattttttattcgtaaattcacagtggagaattcctctcctgatgcattttttctttcattgactattttatttttacaggaggtttttatgattggattattacgctatgccaaagactatcgtaaacagatcgtcttaggtcctttttttaagtttttagaagctgtgtttgaactggttttgccactccaaatggctgcactcgtggaccagggaattcgccaaaacaattggtcgaaagtagttgaaatgaccctctggatgattgcgatgtccgtcatcgggatgatctgtgcggtcatctgtcaatactatgcagccactgcttctcaaggttttggcacggaattacgcaatacattaatgaaaaaaatcaatttgttgtcccacaatgaattgaatctatttggaacagatacgttgatcactcgaatgaccaatgatatcaaccaaatgcaagttgcattggctatgttgatccgtttagtcgtcagagcaccttttttgagtattggttcagtgatcatggcgtttgtcatcgattggcaagcgggcttgattttcttatgtgtgctgccacttttttgtatcattttattttggatcattagcaagacagtgccattatataagaaagtccagatccgcttggacgaactaaatgaactagtcagccaaaatttgagcggtattcgcgtgattcgtgcttttgctcgatcaaaaactgagaccaaacgttttgaccaagccacagatgatttgaccaatgtctatattcgtgtgaccaatctttctgcattattgaccccggctacaaccatgattatgaacttaggaattattgcactcttttactttggcggtttcaaagtgaacatcggaaacttggaacagggggaagtactggcgttggtcaattatatgaaccaaatgctgttggcactgatcgttgtatcgaatctcgtcatcatttttactcgcgctgccgcttcggcttcacggatcaatgaagttcttgatacagaaccgtcgattgatgatagtttatctgaggtttttatggatcaacaaaaacaggcaggtgcccttcgtttcgaacatgtggactttcgcttttcacctaactatggcttagcattaaaaaatatcgattttgagattgttcctggcacaaccttgggcatcactggtccaactggcagtgggaaatcgacattaacgcaactgatcccgcgtttttatgacacagctgctggtaaagtgatcgttgatggacaggatgtacgcaagtggccgctgaaacaattaagacaaaaaattgccatggttcctcaaacggcggttctgttcactggtacgattcgtgaaaacttacaatggggaaaaaaagatgcgacagacgaggaatgctggcaagcattagagatcgcccaaagtcgcgacttcgtcgaagcactaccgcaaaagttggatacgccgatttttgaaggaggcaagaacttttctggtgggcaaaaacaacgcttaacgattgctcgagcaattattgctaaacctgatatattgattttggatgattcattaagtgcgctagattaccaaacagatctggatctgcggatggctttaaaagaaaaaattcgcggaacgattatcatcatttctcagcgtgttcgttcgattcaagacgcacagcagatcttagtgttagatcagggaaatctggtcgccaaaggcacccatgacgagttgatgatcacttccaaagcttatcaagaaattgtggcatctcaagaggaggaagaagaatgaaaaagaaatcatttgattggtctgccttccgccgctacctcccctatctcgctgtgtatgccaaagaaacttggactgctgtcgttttagggatcgctgctggcatctcaacggtttttatgacttatgaaataggtcaggctgtcgataaaatgattggtcctagcaaggttcatttcgaagaactttatcgcattctcgcgttgtttggcggtgtagtgatcgttactgttgtcagtcaatggctgatccaacgattagggaatcgagtggcctatctgtctgtcgctgatctgcgcaaagaaggttttgctcatttaaatacactacccttgcgttattacgatcaaacgtctcacgggaatatcgtcagtcgttttaccaatgacatggataatatctcaattgcggttgctgctgtcttcaaccaattattctccggtatctctgtcgtgctgattgccttggtagttatggttaagatgagtgtgccactgactctcgtcgttcttgtttcaacaccgatcatctttttagtcaattggatcgtggcacgaacatcacaagcagattttgcgcgtcaacaagagatcgtcggtgaaatttctggattcgttaccgaaatgatcggcaatcaaaaaattgtcaaagcatttgaacgagaagcaatcaaccaagaacagtttgaaatgatcaatgacgaattaaaccttcgtggccgaaaagcacagttttcttcctcgttgaccaatccgctttcccgttttgttgaccatctttcctatctgtctgtcggcttcgtcggtggtttattgtacttttcaggctcggggctggtaacagttgggatgatttcaagctttacgatctattctagccaattttcaaaaccatttattgaactgtcaggcatcaccactcagattcagactgcattagctggtttggcacgaaccttccagttattggatcaagtgccagaaagtgcggatgacacagcaacacaagcgatgaaggaaatcaaaggtaaaatcgactttgaaaatgtggcttttgcttatgatccaggacaaaaactgatcgaaaacttttcttttacagctgaaccaggtgaaacggtggcaattgtcggaaagactggtgccggtaaatcgacactagtcaatttgctgatgcgtttctacgatgttgatcagggaactatccgagtagacggcgtcgatattcgtcaattgcagcgaacagcgttacgaaagagttttggtatggtccttcaagacacgtggctgttcgatgcttctttaagagagaatctccaatatggtaatgacacggctaccgatgaagaaatatacgatgctttaaaaaatgcatatatgtatgaatacgttatgcggttaccagataaattggatacgccgattgggcaacaaggcatcaagatttccgatgggcagcgacaattactgaccattgctcgtactatgatcagtaatcccccgatgctgatcctcgatgaagccaccagttcagtcgatacactgacagaaaagaaaattcaggatgcctttttgaaaatgatggaaggaaaaaccagtttcgtcattgcccaccgcttatcaacgatccgtgcggctgataaaattttggttatggatgccggacaaatcgtcgaacaaggtactcatgaagaattgttagcggaaaaagggtattattaccgtctctaccatgctcaatttcaacattaacagtcacatgttgatagattaacgctaaaagaagtggttccctaaaagaaccacttctttttttaaaattgagaattgttatttactccaaacatcgctatattccggtttacgttcaaactctttttttgcaaatggacagagtggaatgattgttttcttttccgcgcgcgctttttctaccccttttgccactaacttttctgccagtccttgaccacgataggctggatcgacaaaagtatgatcaatgatcattcgttttgttcctgcattcgaccaagtcatttcgccgatctctttctcgccgtctaataaggcaaaacgatttttttcttccttgatttccattagttttctcccctttgaataaattttaatgcgccgcttggacaaggttggttcacttgagcaacttgttctttttgagcattatcgggaatgacccacggtcgacgtcctacctcaaaaacagttggattacctcaaacacacttcccactgtgaatacaaatgtctttgtgagaataaacatcgaatgctgagccatgatatttgcgatacccatcagcaagcaactgttcctctgcgtgttcttttaagtgctctgtcgttgttttccctccgtcactgcttgacttttattgaccgccttcatcataagctaaatcaacaaaaaaataaaacaatcgccatttatacgtaaaagatttagcagaaaaaacaactctactagaaaaaactgaaacataagcacttcaacaaacaaacgatccgaagacacatcgaatcctctctacaatccgatcctcgtccctagtcacagagaaaagaattttttctcatgtctagtttggatcatttcgtctgcttttgcttctgttacagctctattcgtttgatttcatttgatagtgattactgaaaagaaccttagtcattgttgatcgctgttagatgaaccatttgtgttgcatagtcgccggataaagcaggatcaatatagaaaccgatctgcatcaattcatcgccgccgattttatatccccccatttgatacactgtatctgccgctaatcccgccaatttgagagtgattagcggtgcagatgcttcggctaatacacggaaatagaaaacaatcgcttcttgtttatcttcagaaacgtacatccatgcagtatcatttcctgcaaaaggactcaacaagcgaataaacgtgccatattggaagagttgtcgatgttttttataaaaggcaacttgctctttgatggctgctttttcttcatcggtcactgtcgtcaaatccagctcatagcccaagacaccagacattgcaacgtttccgcggatcgctaagtcagtgatccgctgtgtttgatggttaggcactgctgaaacatgcgaacccatgctagaagccgggtatgacaggctggttccatattggattttcaaacgggctatcgcatcggtattatcactcgtccatatctgcggcatgtaatacaagaaacctgcatcaaaacgaccacccccgccagaacatccttcaaacaaaatagtgggatgagcagctgtcaatcgttctaaaaagtcatacagacctaaaatatagcgatggaacacctccccttgctgggtaggatctaacaataatgaatagacatccgtcatgttgcgattcatgtcccacttaatataatcaacgggcacttcgttaaatagaagggctaactgatcaaaaatatgtttccgaacatcttctctagaaaagtccaatacaaactgactgcgacttaatgcgggagaacgtccaggtacttttaaggcccactcggggtgctgacgatacaattcgctcgcttctgagatcatttccggctctaaccagagaccgaatttcaaacccttctgatggactttttccgcaaaccctcgcagaccagaagctaactttccttcattctcataccagtcacccagagaagtcaaatcattttctcgtgcaccaaaccaaccgtcatccaaaacaaacaattcaattcccaatgccttcgcttcatcgacgatctgctccagtttttcttcatcgaaatcaaaataagtggcttcccagttattgatcaacgtcggacgttcagtcagctgatactgtccacgaataagatgactattataaaagcgatgataggtttgtgacatttggttgagcccttgattactataaactgtaaccacttctggtgattggaagctttcctgaggtggtactgtccaggcaaatcgataactactgatgcccatgatgagccgcgtttgatcataaggatctttttcgataatcgtttcgtgattgccgctatacagtaaactaacgccataacattctcccgagaattctgttgtagcgggatctgccaaaataacaaaaggattctgttgatggctgctggaacctcgcttgctgtccaatttcttgatacctgtctgaactggttctcgactgatttgccgttctttcgcccatgcaccattcaattggatcaaatcaagcggccggttgggaaaatccagtgattgactggctagttgatggataacgattggttcaagaccgtcattttttaaggcacttgaacgaatgattgctgatgtatcagtaaaaatactataattcaaaaccaattcaagcgcggcaacttcatctcgcaatatgatttgcaacgtttcgatttcttgcggagcaccgtgagtttgaggcaaccccgcaagtgctggtttgccttgactgatttcatggctttgatagataaaatgcgcaacatgactgccatttggcagttggatatcatatgccgcttcacgaaaatcaccgaacccattcccaggaaattccatcatcagcgtatccagcgagaataagcgatccttgctgcctgctggattcggcgaaaaagaacgatctaatcgcgggtaacgataatggccagaataatgggtaattttctttccaaagtagatatgcgctaaatttccaccttcttcgatctgcatcacataactgattttgttgttgcttaaatgaaaaatttggttttttttatcaaaatggatcatttcatttcctcgttttctcttttctttacttcacagaacctaacatgccttgtacgaattgtttttgtaatacgaaaaagataatcgctgttggcaaagtggcgatcacgatcccgcacatcatcatgccgtaatccggtgtataggaagcccccatcgcagataaaaccaacggaactgtccgtttatccggtgattgcaaggcaactaatggccacaagtagttgttccagctattcataaaggtaatgatcgctgctgctgcatacgtatttttagcagtaggcatatagactcggaagaaaatacttaactcattcagcccatcaatgcgggctgcttctactaattctttagggaaagctttgatattttggcggaaaaagaaaatcaggaacgctgtacaaacagaaggtaaaatgaccactgcaaaagtattgattccgattggggttccgctaagctgactaaacatgcggtataacggaatcatcaaagccgcaaaaggaaccatcatcgataagagtaaaatattgaaaatgcgatcttttgttttggctcgatagatctcaaacccatagcccgccatggaagaaaacatcaatgcgaagacggtcgtaatgaccgcaatcactgcagagttgcccaaagcacgagtaaagttcagttcagaagcaaataaattttggaaattgatcaccagctgatcaccgatcatgatttttcctgccacaatgtcaaaggtttgattggtcattcccaataccatccagacaaatggaaagacggaaataaaggccaaaagacctaagaaaagatactttaagcttaaagagagtgttttcaattttctttccctcctaattttgtttggatgacggataagaccacaatagcgatcacgatcacaaaggatactgccgccgcatagccaaagttcggggtgaatttataacttaaattataaatgtactgcgagagcgtggtggttgcattggcaggtcccccacctgtaatattttgtacttcgtcaaataattgcaatgttccgatcgttgaagtaattgtcgtgaataaaatgattggccgcaaattaggaatagttatcttgaaaagttgatcccatttagtcgcaccatcaatttcagcagcttcatagatgctaggatcaatgttttgcataccagaaataaagaaaatcatattatagcctgtccagcgccaagtaatggcaaaaataatcaagacttttgcccagaaaggatccgttagccattgaatcggcacctcaatcaaatgaatttgcattaaaaaattattgactaacccattcgctgagaataaacttttcatgatcaacgagtaagagaccaatgaagtgatacaaggtaaaaacaaggccgttcggaaaagacctttgaattttaattttttgtcatttagtatgttcgagacgatcaatgccaaaaacagcatgatcggtacttggattaataagtataaaaatgtattaccaaaagctttcttgaaggttgagtcactcagcatccgctgatagtttcccaaaccgttgaatgacatcgttgtcggcggtcccgactggaaagacgtaaaaagagctgaaatcataggaacaaatactaatagtgtaatcaagatcacaggcaaagaaataaacgcgtttccattcgcaaaccaatttttcgatttatttttcatggtgattcctccttcaaacgacactatggcaccaatctaatgactatacgaacgattgctgcttaacagtctcctctaatgggaaattattggtaccagcagctatcgttcgtatctgatttgttgattatgaaaccatagctaaatgagtggcttagtttgcgatttgtgcttctaattgtgtttgtgcatcttctagtactttatcgatatcttccccattgattactcgctgcaagctttctgtcaatacagattcgatcgcataagtatgattgccgtagttgacggccgggatctcttgtgaccattgagagaagtcttggaaaactttttgtcctccataaaaatcaagtcctgaagtatattcttttgtctcttcggcagcattcatcgttgaaaccagcccaatttcagttgccaatgttcccatcaattctttatttgaagcaaacgttttcgctaaaaagtctttcgcattctcttcaccagctacgcctttaatgacataccatcctgctccgccaatacttgatgcgttcactgaattgccaccagctagtgccggaatcggtgcaatcgcccatttgccgctttgatcttcagccccttgaatcgtactagaataccaagcgcctgttggtgctgcagcaacatttccggattggactgcattgacgccgccatcccaatcagagacttgttcaactaatccttcattcagtagtgtcgccaatacattcaagccggctttgaatgattcgttgtctttaatcgttactgtggtgccgtcttcaccggtataccattcaccagctgactgcatgatgatccgtgccaatcccaaatcgcttggatccagagacatcatggcatgtcccgttttctccttgacatctttggcaatttgaataaagtcatcccaggtaatatcttggagatcagcagcttcatatcctgcatctgctaaataatctgtacgataaaacagccctgctaccccactatcaaaaggtacaccgtagatcacatcatcgattttgttgacggcgaatttgtagctggaaaagtcatcttcattgacaatatcagttaagtcgctgaaagcatccggataggaagataaatagccttgaatacgatagtcttcgatcaaaacgatatttggcaagccatccgtattgcctgatgctagactagtgttcaacttttgaacgatgtcatcctgtgacatggtcactacttccacatcaacatccttgttttcgtaaacctttttcgcttcattgacagctttgatattgaaagtctcatcccaagcccaaactgtaaccttatcagaagaacctccagtgtcaccagtactttcgttgttgctgccacaagctgtcaatgtcaatacagtagcggcagtcacaagtgatgcaagcaattttttcatttttctccctctttccttttaattacatttttactatacactggagttgtaaacggatacaatacgcgtggaagagcttactaaaatagtccaaaaatagaaaatttttaccaatacctttcttttatgaaagcgtttatactagaataaagaaataggggggataccatgcatcatttacatacagtcttgcttgtggatgacgagaccactattcgtgatggtttaaaacatatgattcgttgggagcaagaaggttttcgcttgctaggagatgcagcaaacggacaggaggctctaaacctgatccagcaattacagccagagatcgtgatcacagatttaaaaatgccgcaaatggacggcatccaattaacaaccatcattcaacaacaatacccatctatccattttctggtattgagcagttatgatgattttcactatgtcagtcagtcttttaagaacggtgccattgattacttgctaaagccaacattgacgcctgctttgttgctgaaagccctaaacaccatccgcgaaaaaaaatctgatacccgccaaataaccgctgaggtcccattacaagaatctttgaatcgctatctggctgggtatgaagaaccacttactccttttgctgactatcttgaaatagctatgaaacagcaactatgttttctttatacgaatgtcagttattttcgttctactgaacagctttttcatgcattgacagaattttcgcaatcgaatactcacttaaaaacattagcgttcaagaccagtaacaatgatgcagggctattgatcagttattcagcagaatatgattttttttcctctttgaaaaaatgtttggaccagttgacctataccgaaccaaatgccttttttacccttggatgcccgtttgaatcgattgacgacttacgcacagcttttctgactctcaaagataaaagtcgggaacaatcgtttttttacaaacagcagcggcttgtttttgagcatgaactttttatgtacatggaaagtgatcgttttgatacaaaaaaatttttgcgggcattattagacaataatttcctgttggggattacgcgtatcgaagactatttcaatgagatgattctatcaaatgttgatccgaactttctaaaacagcaggccagcagtattttttatacgctattatcccggttagaagaagaatttccaacagccccccgctttagtcgcttgcgagcggaatttcttcatgagatcggccatgtcttatatttggaggatttctccgatttgttgttgtcaacgatcgatgagatacgactgcaactgacagccctctcccctatggatgaagatgacttactggtctcgatccagcgcttcattcaagacaattatatgaagagcctctcactatctgagttggcagaaacgttccactttagttatacctacttgtcagctttcctttcttcaaaattaaaaatgagtttctctgattatctaaaaaatacacgtctagaaaaagccaaagagttgctgacccaatctgagttgaatttgtcagaaatcagtgaagcagttggttattccgatatcagctatttttctcgaatctttaaaaaagaatttcaagtcactccttctaagtatcggcggttgaaccaattatgagaatccaacagtggctcaaaaaaaatgaattgttcagccgaatctttttgtttgttgtggtaggagtaatcagtgtttgtttactgacagtgatcgttatctatggacggtccaaagatgcttatgtggcttcgtatcagagctcgaaccgcttgcttttggataagatccaggaagattatgagcgcttgaatgagaatatcaatcgtatttttgatgtcgtcgatgagagcaaagccgtagaaaattatttaaaaggacagctaaatcagggaagaacgattttagaactcaatgaacagttgaaagatactcgctcgctttttcaaacgattccttccaacttggtattgattggaacgaacggacgatcattctttcaaaatgatgctgtccgaaaccagtcggttgaaacttttttggcaagtgaatttacgcagcaaatcaatgaaaatgaggctattagtcaatactattttctggagcaagggttgagcacttctacgagccattcaccaggactgatgtacgtgcggaaattaatgaaagacgatgctttattcggttatgcattgatttttttgaaagaatctgatttttcttccatctatcggcaattgttagacacaacgctgcataccatctatgtggtcaatgatcagggacagatcttatccacttctgaagaacaaaaattaggtacagcttttgattcagctatgatcgaagtgaaaaatgattcagtgaatcagatgcctctttattcttatcagtttactttttatgatctgctggatgaatcacatttagtacgcaacatgaatctgatcaagcctgccgtatggatcgcttttctcagtatcttgctctttagcctgtttgctttctggatcattcgtacgatcacacaaccaatttatcagttgatcgacaaattaccggcagtcacacagggtgatttcagcaacaaggtctcgatcaacgggacctatgaaacacaggaactaggacgtgcctataatttgatgcttgaggatttagaatcgtatgtcgatcatttgatgattactgaagcggaaaaacgcaaatttgaaatccgttccttgcaaatgcagattcaacctcattttgtttacaatacactcaccgcaatcaaatttttgatttggcaaaatgaacaggagaaagcaacacaagccatcgatagtttcgtccaattgcttcgccataccttcaaccgcaaagagatcgttccattaaaagatgaactcgccatcgtagaagaatatctaatcttgatgaacgttcgttatggtgaccggattcaatcagcgattttctcagcagaagaatgtgaaaattgtttggttccaaaaatgatcttgcagccaatcatcgaaaatgcttatctgcatgcgtttcctgaagaagagaaaggttacattcaaatcttctctcgtatcagtaaatcagggctagtcatcgaaatcattgatacaggtatcggctttgatgaagcatcttcggtgattaggaaccagacaagcgaacattattctggtatcggattggagaatatcgatcaacgaatcaaattactctacggggaaaaatatggcctgacagttgactctcgtgtcaatgaaggaacgactgtgcgcttattattgccaaaacagtaagtaacataattcttaaaagagccaaaaaaaatccagccattcgcactccggctatttttctcaaatctaagaaaatagcttccccagagaggccatgggtggatttcttaatcttaatcgcttacgttttttccattggaggcaatgacttattgctataaaaaaccaatcatcaatgaaccggcttccattggaatcctccattgatgattggttactccctatttttgtgggtatcttttacttttagatccgattttcgtgatccgcagttttgactaagttcgcaccgaccatgccgccgattgatgttaaaactagtcctaagaccattgctataaagccccatatggatgctttagcagtagcatcacttatttcatcagcttttttacgcgcatctttgactgcttgatcgatatcttgttttgcttgttcaagattttgctgtgctgtttcaatttgttgttgtgcttcatcagaagctttttgtaagccattgacaatattttgtgttgcttcttgtgcttcttgttgatttaaatcggtatttttcgcaaccgcatttgaaatggcttcttcgtcaacagaatcgctgatttttgttgcccgatctttgagcttcgttgaaagatcatcgatgatttcgtcagctttatttggatccgtagcaattttcttccctgcatcggtaatatcgctcgttgcatcagaaacttgatcttgcaagtagtttggctgtaattcaggaacgtcagtatcttttaatacatcgcggacatccgtttccaattgatcggtattaatatctcccatattccctgtgatctcatcaaaggcctttgatgcgacatctgctgttcccgatgcgacattctctacgccacttccgacagctgaagcaatgttgcccagtaatgagccgacaacagaaaatgccccaattgttacatatgataacatgacgattgtaacgatcatactggttgcccaagtaagaaatccatgtaccaaaccaacgcgtctagctgctacaccagaaacaaatcctgctccgaacaatgaaagaatcaatgtcacaacagtccaaatcatcaaacctgttcccacaccatccaatgggttgtttgaggtaggttccaccatgccaaagccgatcgctgagccgattaatgaaaatgtcataaataatgcaataaacgtcacgactcctgcgaaaatagagccccaagataagttataacctgcctcccgctcatttgctcctaaataatctctaaatccgtgtttcattttacatcctcctttttttcctctaaaaccagtctaacaaccctacgtttttttatcaatcaagccgacttatcgctcgcccagaagtaaaaatacatttgtttttctattcatcagcactagcttttcaacttatatttattaggttttgtcaccatttcttgaaagataataaaaataatcgtttttgaagaaacccacgccattctcaattgtctcctaaccattctcacccctaaatggacaacaatttttcagattatttccatgtaaacaaaaaagcacaactaacatctctcttgttcgctaagaataatcgtcaaaaagcttttataccgcctttttctaagttcagcatgtaggatttcctaaggatcagcatcgtccatttactgaaatcacatagataaaaataagtacatgcacttgtcactgttttttaacttgtaggaacaggtattatgtgttattttaaaaacaaaaaatcttcttatatcgttcgtttattaattacgtacatatatttaaagaccgaataattattctatagtgattcttttactctaaaaaaacgcataaaaaaaaagagaaaatctgctatttttgaatagcgattttcttcacataaaatccaatgataattttacaccgagattatttaattacacaacacgacaaaagaagaacttttttaatcaaaaattggtatctcaaacttacatttttgattcattattaaataatatttatgataatatttttaaaaggaggatgattatgtttgaagatctgttactcaccaatcatgcaaagaaaaaattagcaattttgacttatttaaatgagaataccaatcaaccaatcaatatcagtaaaatcgccgagcatctgggcttgtcttatcacgggatagcaccactcatagaggaaatgcaacaagagttttcagcgctttatcaagtttcgttatgtgaaaaaggtttcaaggttcgttcattagaagaaccactttcctattcactttatcagaagtatttgattcaggaaagccttgctttccaacttctacttacatcgatcatgaacccggaaatgaccatcaatgatttttcaaccgttcattttgtcagtcattcaacgatcacccgggcacttaaaccattgaatacttatttattgggaaaagaaatccatttgaatgtttctcagttgaaactgactggaaatgaaatcaatatccgttccttttacgttcaaattttaacttatttagagaactcaccattagaagcggattacttaacggacttcagtgatcaaacggttttgatcaacgaattagcattacaaaagttttctcctgttaaccaacgactgatcttagtcattttatttgtatccaaacttcgtttcgaacaaggctatttgcttaacccaatcaatggttttgaaaaattattttcaaagatgaaccatcctctagaaaattattttacggcatttatgactgacgaaaagcaagtaacttatcagatcaattatgtcaaaggaatgctgttctttctagtccgtttcgctgagccaacaccagaaagagctgctctactttgtgatttctatgaacagatcaaagaagatgatcctatttttcatgagtttatggctgattttagtcacgtattattaccagaaatcgttgggatcccttttgatgaagaagtattttctgaaattcaaaaagatagcttcattattctgtatattttttatgcaaacaatggcctattgattgatttttggtctcaaaatgagttgaatctatcctttcaaaagaaaggatttacaaatctacagaaaaagattcgtccatttttgacaaaatacactcgacgtgttggttatgaatggctcaaaaaagccaaatcgctagtcctagactatctgacttttttcatatatccgttttatcaacagcatcatttacaaaaattacaggtgggaatcattccttcattgaatttatcagccattcagcaaatcagttttttactggatcacattcaatttgtggactatgatatcgtaagaaaccacgaaaaagactttgactattacatcgttccagcaaatagattgttgccagcaattgagtatcctgcttatgtcatggaagaaactgagactctaaaagagttgtcgccattatttgacgctttatgggaggaatatctgacaatcaacgacttttcgataaactaaaaaaccagtggcttcctttttggaatgccactggttttctgtctatcattcttgatttaacatagaaaaaagcagaaatcgctgttttcctgctttttcctacttcaagttcctgtttcctcctaagatcgacagcctggaatgcctgctaagcaggactttggggagaggtcaacgaccttggaggagcaaatagtaaattattactagaaaccacctattttttgcgctatcgaaatctgaattcaatcagatttactgaacgaacgtttagcgtaagaaagaaaaaatgttgatcatattttcaacaacttcccatggaaatccaaataattgaaacattttcttttcctcctttaattgactttcctttagtttaattggaaaataggactatagttgatttggactattttttcgtccacctattttctaggtgcatttaggaggtgcttttttggaagccaatctattactgaaaaagttacgtactgaacgtaatctttcccaaagaaagttagcagccgatatatctgagcggagcacattagctacttttgaacaaaaagggcatcgaattgcttttgatatcctttacaaataccttgatcgcttgaatgtgactctcgaagaatttgaataccatttgacaaataatcaattaaatgaaaagaagcaactctcgaaacaatttcacaatgcttattaccaacatgattttgatcagctggccgtcttgatcgaagaatctaaaacaacgtatcaggaaacgcaagactttttctattatttgctttatagccaatactatttgatcttgaagaaaaagggatacgtacatactatcgatgaaacagaaagaattgaaaccgtgataaaaggttatctcgacaaaatcgaaacttggggaagatttgaaatcaccatttttgcaaatctaatgtttctttttacagacgaatatattttgtttcaaatcgagcaattgaataagcaggagttttataataacttgcttagtctcaattatcatatttattctaagctgttgaccaacgctgcctttcttttcattgaccgcagtcaaatcgatcatcttaaacaaattttgttttatatgaccaaaaatattccattagacaatgaccggattcgattgatgatccgctattttgaaggaatcatcgcgattttccatggtgagatcgaaactgggaaacaaacaatttcaaagactattgagatcctaaactttttaggacaatctgcctatgccgctgaattaacagaattagcaaccaacgtcctgttgaccgtagcgccttctgaagaacctttcttataatgtcgttgttctcaaaatcaatgtaagaaaaaaaaacgatctgaatgccttttttcggccccaataaatggtgaccggaaacagtgactttcagatcgttttctttaattgattaatccaagggaagttttccattcaaggactcgtttgacggaagcatcgatggctgcttccggataattaccacttctgacagcatccacaatcactgggatctgttgctgataggtagatgacatcactaaatcattccctgcttctaatgctctcagccctgcttctgattgggaaataaagtctgctaggcccgccatatccatgtcatccgtcatgattactcctttgaaacctagctgcttcctcaataaatcatggacaggcttcgaaatagaggctggtgcgctggcatcaatactggtaacaatattatgtgagactaaaatactgtcagctcccgctttgattccagcttcaaaaggcaagaaatcattcgtttccaactcgtctaacgaacgttcatctgtaacgatctctacatgagaatcacggttattgccgtatccgggaaaatgcttcaatgttgagccaatccgcttctctttcaaaactgcaatgtttctacgaacaaattcactggttccttcggcatctaagcctatggttcgatcgtagataaaggcattcggatcagtcgctacatcggcgaccggaaacagaccggtagaaatgccatattcgtggaaaatagctgccttttgagcagtatcttcttcaattgcttgccagcccccttgttggtaaagttgctgaggggataaaaatggtgtttgtaccaatgcagggttgcgactgattcgagtgacagttcccccttcttcgtccattccgatcagcaaaggtatggaactggcttgctgataatcagcaatcttttgcttcaacgtctcagctgtctcattctccgtatcacgtccgaataagacatagccgcctaaatgataggtttgtatatcttcgacttgattgatttcaggcactcgtacaaaaaatagttgcccgactttttcttctagactcatttggtcaatccgcttatcaatcgtcgtttcctcctcagttgattgttcgggaatactcgactcggtacttagagaacttgttgacgttgtttgtgaagcgtttgtcggttgttccccatttgactgttggtccatcagccacttcattcctcctataatgagcaacagaagcaaaataaagccacccataaggattccttttttattcataaattcctccagttcataaattcctcgtcttattttacatcagcctattttagcatgccttttaaggtaaaaaaagcgaacacgacacactcaagtgtactgttcgctttattggatgtttgttttttattctttttttgttgctaaaatgattaggtaaaacgccgagtcaagcgtttataaggcactgcgcgcccaacaaagtagatcaaaactgtctgaataggaaacatgataacagctttcatcaatcgagccgaccaaattgcccagcttgttaatggaatattcagcatcattgccaaccagatcggtgtcaaaatcaatgtgatcagaagggtattcagcaagaccactgttgctgcccgtttccaagttacttcctttctataaaaaaagtaaccgtagatcaacccacctacgaatgcattgatcgtaaatccgaagaaataagcggatttagggaataaaatcattcctgctatatcagcgaccgaagcccctacagcagtccagaatggcccaaaaagcatccccataatcaactcaggaacaaaagtgaaggtgagtttcaaataggctgtttcaaaccccaagatttgcgacaagaccaccatcagggcaatcaaaagccccatgaccgcgatcatgtgtgcgtcgacttttcttttcataacgagcatctccttttagagctgctacaaattcatgcagcgaatgcgaaaataaaaccgcgaacgaatcgttcttcgtccaaaaggcaacatcccatcctttcgacacttaacgctttatttcctactctgatttatttaggtatctctacccagacaaactatagcacagattctagtggtcttcaattttagtccctttaatgacagctgttttttaagaatcgttcgtttttttgccgtatcttgggcaaaaattaaggcagagcagtaatggaacccaataccactgctctgccactttgattaacgttgatcagccaatgatattatcgttgatcaacacacgcttgatgtttttcaattcgtgagcaatctcaacttgctcgatcgtcaaacgttgatttacttcttccatcgaatggatttctttgttcaattcattgacattgtttaccaaatttttcagtgcttctaaaatcaattgattactgtccattattcctacactccttgtctttattcttctctcgaacgttctgaaatagcggcgctttcgacgactttttttgttttataaaagaatttgtacagtacaataacaacgaccggaatcactccgcaaatgatatagatttgagaataattaaacatcccctttaagctacctaatgcataaggaccgacacctaatcctaagtctagaccaatgaaataagtagaaagtgcaacaccgatccgatgagaatcgacttcttttagacatacggcttgtccattagacatgaatgtaccatagccaagtccaacaaaacagccagaaatcaacagcatcaagctattgccagtaatactcaacaagaacaatcctaatgtcaagaagataaaacttggatacatcactgcatctgcaccacgacgatcaaacaagcgacctgtcattggtcgagtgaaggttacggataatgcataaacaacaaagaagaatgcgcctgcggtttctaggccaaggtttccggcataaatagaaaggaaacctaatacactggaataagacaacccaatcaaaaaggccagacctgaaataaacaagacttttggctcaacaaaactgctgaatgaccatttctttagttctgctcggtgttctggtgttaaggaaatatttttcactgggaaagcgaaacaagcaatggctgttactatcgaaagagcagttgctaataggataataaaatcaaaaccaaaagagggtaacagcagcattccgataaatggaccgacagcagctgctaaactcgtgcttaatccatagtagttgattccttctccatgttttgaagagggaatgtacgccgtaacaattgcatttgccgctgtagacactgctccataggcgaaaccattcaagaaacggacaccatccaaaatcatgatattcgatgaaatcaaataagccgccgtagttatgacataaaaaatcattccccaacgtaagatggcttttcgtccaactagctccaataccttaccaatatacaagcgggcaatcaatgttcctataatatagatccctgctgcaaacccagcttgtgcagcggaagcccctaattcttgcgtagcaaactttgccgtgatgacgacaaaacaataatagaccagaaaaacaataaaattaatcaatgtaatagtaataaaacctttgttccatagtttttctgtttgttgctcctgttctgacatgttgtgttttgctccttttttattgtttctttgtttcatcatcctctttctcagatgacaggtctaactatacctgatatttcaagagcgcaaattcgcttttgttgctgaaaaaacgcaaaaacataatacattaacatttgttattgctttttgagttagaatgttctttaattaaaaaagaatattcacccagatttggcgaatgtgactgttcattgaaaaggaaacactataggaataagaggagtgctttgtttggtaaaacagctattaatggactatttagaacaaaataatattccagtagtcatacgtaaaaaaagaagttatttgacgtatgaaggaatccctgatcgttatgtctatattttgaaaaaagggatcatcaagacaagtgtcgtcactcatgaggggcgtgaattcaatttgcgctatatgaatgatttcgatattgtttctctttttaaagatgaatcttcacaagaagtcgaagcgcccttcaatgtgcgtgtcgagtcagaagaagccgaattatataagatcgtgcgcgatcaattctggacagatgtcaatcaaaatcgggcgttacaagattatgtcaaagagtactatcgcaaaaatctaatgtactccatgaaaaaaatgcagcaaatgctgatgaatggcaaatttggtgcggtctgtacacaattgaatgaattatacgaaacctttggggtaccagtgggtgaaggaaccttgattgattttgaggtaaccaatgaggaaatcgcccgcttttgcggtatcacttcagcaagtagtgtcaatcgaatgatgcagcggttgagagaaagcggtgctatcaagactcaagaccggaaactgttggttttagatatcgggtcaattcgcgaaaatattatttattaaaaaaggcagctagtcgaatttcttttgactagctgcctttttgtttaacgtgttttgtgttgtttgaattaaatgaaatgaactgtttctgctaccgtgatcgttggatctaatgattggatgactggacaattcggagaaacgagtttgagacagcgaatggctttttcttgatattccgctgaaatccgcgcataaaaattgatctggatcgaagagatcggctctgctttcttcgtagaatctctcgtataactgacttcgattttttcaatctcagcaggcacatgagaattttccaaaacagaagtatacacataaccgccacaagctgcggctgcagttacaagcatctgaaccggtgagtatcctagttcccgagccaagacccagttgccattttgctgtggtaattctaatttatcttttcctttaaccagtgttaaggtttcaactgccatttttttctctccttacataatgttctttttctacttctatccattcaaaaagaggacttaaagtgatcgtttcttggatgtctttctgatccattgctgctcgagccagaattggatcagcgattggtgctgctgccaatagtttctttgtataaggatgctgagggctttcaaagagtcgttttgttggcgccaattcaaccaattttccttgatacatgactgcggtgcggtcactgatatgacggatcacggataaatcatgggaaataaataaataggacaatgaaaattctttttgcagctttagaagtaattgaatgatctgcgcttgaatcgacacatctaatgcagaagttggttcatcacacaagacaaaggctggtcgattaacgactgctcgagcaatcccgatccgttgacgttgtccaccactgaaattccgaggaaatttatggatgtcctctcctttgattccaacgatcgcaagtatctctttagcctttgctcgtgcagcgtctttcgtttctttcagtaaaggctccatcactaactccaaagcagtcattcgtggattcaacgcagaataaggatcttgaaaaattacttgcatctgctgatagcgtttcttttgttcctctggtggcaaacttgccagctcttgtccctcaaaaaaaactttgcctgcagataaagtttccagattcaaaatactacggcctaatgttgttttaccactgcctgattctcctacaaggcctagagtttcgccccgatggatcgtcaaactaacattctctactgcgcgcacttctgtcactaccccacgccagtttttgcttcgaaacgttttgctggcctcttcgactcgtatcaattccttcaattgcttgcccctccttcccaaacacgatgcgtctcagagatttcccgaacgtgtaacacatcaggaagttcttcctgatagtcaaagacaactgtttcttctttatcccctaagtgggcggcctcgagcagttgcttcgtatagagatgctgaggttgatagaaaatttcttcagtagtcccttcctctaccactcttccttggtacatcaccttgataaaatcacacatgccagcgacaaccccaaaatcatgggtcaccagaacgaccgaaaggttctctgctcgctgcaattgcttgatcaatgccaagatctgagcttgaatcgttacatctaatgcagtcgttggttcatctgcaatcagcaacttcggctgtgccaacagtgccatagcgatcatgacccgctgccgcatcccccctgataattcatggggatactgcttcatccgctgttcaggaagggggatccctaccttgttcaactccgcaatggcaattgtttgcgcagctttttttgacatcttctgatgtctgcgaatgacttcaatcaagtgatacccgatggttcgcaaagggttcaatgatgtcattggatcttgaaaaatcatggctagcggtaatttgctgcgatcaacaaccggttggccttcaaaaacaaacgagtcaaaggagtcggagatattttctggtaagatccccatcacgcttttcatcgtcatactcttgccactgcctgattcaccgacgatccccacgacttgtcctttaggaatgactaggtcgatttctttcagcagctgctgatctccttgttttctatgaaaaaacacgtttaagtttttcaccgtcagtaatggctctttcatgcttgctacacctcccgctgcaagacacgtttgatcatgtcccccagattattaaatgaatagatggtaaaaatcacgaataagccgggcagaattgccatataaggggctcgttgcaaactgctttgggcattttgcagcaaactcccccaagaagccattggctgttggattcccattcccaaaaaactcaacgcagattctgtcatgatcgctcctgagatgctggcagaagctgccacgatcagcgtaggtaaaactgctggaaaaatatggcggaaaataatactaaaggatgtccgaccaataaacttaccatagacaacatattctctttctttcgcagcaagtgtttctccccgaatcagacgagcgatattcatccacgaaaagcctccaattacaataatgatcgtcgtcaatcccggacgcagaaagacacttaaaacaatcactaataccaaccaaggaatggaagacaagacatcaacaagacgcatcaaaagactgtccacccaaccaccaaagtatccagcagctaaaccgaccatcgtgccgatcaatgtcgctgtaatcatcgctagtactcccactaataacgagacccgaccgccgtagacaactcgaatgaaatagtctcgtccaacttcatccgttccgaacagatgggcccagctaggtgcttgggacatattgctgacatccgtcgcattcggatcgattggaatcaaaggtgccgctaatgacaacaaaatcagcaacgtcaaaaagataaaagaaaaggcgtaaactggagaagagaaaatcgcctttctgattttcttcaatcgtttcatgaacgattccctcctttacgtattcttggatcaacaatcgaataaagaacatccgccaatagattgcctaaaataactaaggtcgctgacagcaacatgattgccatgatcacgggatagtccaaacttttcgtagcactcatcaaataaggaccgacccctggccagccatagatggtttctgtaatgattgctcctgtgaccagcattggcagtgccaaaccaatttgcgtcacgatcgggatcaacacattgcgactgatatgacggctaaaaatctgccatttcgtagcgtgaaatgcctgctgtacaacgacataatcttctgatacttgttgcgtagctgaggcgcgaatgtaccgagttaattctgggaaaaaagcgaccgtcagtgttgcataaggcaaaataaaatgttgcagaaaatcgttgaaatctccttcttttccaacagtatacatcccaatgataggaaacagattcagccgatacccaaaaagataaatcaaaatcattgcaaaccagaatgtaggcaccgcgattcctaaagaagcaataccgtcgatcagacgatcccatacttttcccttgtttgctgccgccaacagtccgagtaaaattgctaacagcaatgcagtcagatacgctggcagaaccagtcgaatcgtattagggattctgaccgctaattcttgagcgatactgttctgggatactaatgaaaatcccaagttccctgtaaggatgtttttgatccatagaaagtattgcactagaaatggttgatccaatccatagcgttgccgcaacagatcaatttgctcttgtgtcatatttggcgttgtgattgaatcgatcacatcataaggtgcgatatgaatcagtgaaaaaacgatgaatgaaataacgaatagcagaggaatagcctgcaatactcgcttcataatatatcggaacatggtttcccttctttctctcaaaaaaatcatgacagaaggcagctagacagataacaaatcgcatgcaccagaggagcaagaacctaagtatttcatccaactgatatccgaagaaacttgagatggctcctgtcatacaagagcggttgtaccttcagcgtctacctctatctcaaccatttcaggcattttcatctggatgttacttagggcacagcccaacttcttggtgcagatccgccaactttaaagaaggcgaatccgtctatgttttccgtctttctttgacttctgtcacaaccattcatgttacttgatcgtcaattttgacatatcttcaaatgtgtagattggaatcaagccagcttcttctacattggcaatgcgattgttgacggctaaaatctttttattatctacgataggatagattcgagcatcatcagcaatggcttgttgcagctggtcatataactctttccgttttgtttcatctaactcaaccgctgctttagcaaacaaatcatcggtagtattgttctgtgtttggaaataatttgagctgccatccgttttgaaaagcataccataaagatctggatcatttcccatgatatagccgcctaaaaataaattgtattttgtcgaaccggcttttttcaattctgtaaagatcgctgttccatcgccgccttccaatgaaacgttgatacctgcttgctgtaattgttgttgaatcaatgttgcctgaatcgtttgtgcaggatccgttgaagtaaatgctagattcagttggagattggatacacccgcttcttgcaaaagttctttggctttttccacatttgtttcatatttttccacgtcttcggtcgcgtaaggattgttcggtggcaagaaagaatatggcgtatcaaaatattcatcactcaaatacgctgcctgattcatttcatttttgttcaaagcataaagaaccgcttgtcttactttgacatctttgagggcatcagaatgagtattcaatcctagataaccaacccgattttcagtatacggatatactgagatcattgaatcatccaaatcttcaatatcagaaggcaagacaactgccgcatctacttcgcctttttgtaaagcgactttagccgtatcagtactttcaatgatccgcaacgtcacatttttgattgctgcttcaccgccgtaatagttttcattggcttcaaaagtaaaatattcgccgcgcttgtattcctttaatttgtaaggccctgttcctacgggggtttcaggcaattcgctaacagaaaaatcagtcacatctttataaatatgttcaggaatgatatacgtttcagttgcgatattatttaatgctgctgcacttgcagaaggtaaaacaaacttcactgtataatcatcaactttttcaatgctgaccggttttccatctacccataacgcatctgcattgccgttttcttttttcactttttgttcataagtaaaaacaacatcctctgcggtaaaggcttcgccatctgaccatttcacatcttttttcaaatgaaccgtcaaggacaagccatcctcagctggctcaacggaatctgctagtgcattttgggttgttccatccgcttcaacaatcactaaaggagaatagatcatgttggtgacagtcagcccccaacggtcactcgtattgattggattcgttgacgttggatcaccgctgatcgcataagtgaacgtgtctttatctcctgcttgagttgaagtttttgttgttgaatcttgtgtactggatgaggagcacgcagctaagaataaacctatactgataatcgctgtcccaatcaatccttttttccaatttttcatcgttctcctactttcttaccatacaggtatacttgatttttttgttactttatcaataatttctttgacttcatctgtttgataatacttaatgatcgtctgatacgtctgattttctttttcctccgctcgggccgcgatcacattgtaatacggtttggacgaatctgcgacaggctctaagaaaatcgcatcttctgttggcacaaatccggcatcaacagccatcccattgttaatcaatgaaatatcgacatccgttattgctcgcgcggtctgattggcgtccagcaacttgaacgtcagctgcttcgggttatcggtgatatcattcgtcgttggcagcagaccttttgattgatccaatgtgatcaccccggctgtctgcagcaacaataatgcgcggctctcatttgaaacgtcatttggtaacgcgacagtagcaccatcagccaattcagcaatgtctttgattttgtctgaataaatccccagtggattgagtgtggtataagcaatcgttgtattggaatatccgctttcctgattgacattatccataaaaatctctgtcaaggctgcgtgcagatcaatcgaaccgtcctctagtgccaggatgggctgacgataatcagtaaatttaacgagctgtagattgatttgctctttttccaacaattgttcctgaacatattcccaagcttcattttgctctccaacaaccccaagctttactgtagttgcctctgaggcaggtttgctgcagcctgccaaagcaaaaaccaatacgcctaaaaatacgctaacccattttttccaacttattttcatttttttcttcccctttttccccctttgagcgaagcctacagaagcaacgatccctttcttgtgattgtcgcaaatagacgcaatgactggatagaatacttagtacttaactacaactttacatttcctgctgtagtcagttgatcatcggactaactattcatatgtagtgtaactttatcttatacaccaaaaactgtcaataaagaaactctagtaaagccttgcgctatatctttctatagtactcgcaaaaaggggtttttttagatgtaagacaatgcctgcgtaagatccgcaatcaagtcctgactattctcgatcccaatagagagccgcaagagatccggcgtcaaaccataggactcccgtaactctttagggatatctgcatgtgtctgcgtcgtaggataagtgatgagactttcaactccgcccaaactttcagcaaatgtaaaaattgagagttccttcaaaaatgaacggactttcactgcctcctttaaccgaagactgatcatacctcctacaccaggatacagtacgtctttgattgctggctggcgttttaaaaacgcagtgatttcttttgcgttttgctcttgtctttcaaaccgtaacggcaacgtttttaaactgcgaatgaacaaccaacagtcgaagctgcttaaagttgggccagtggtattggcaagataggtcaagcgttcaccaagggagacttcttttgcaatgatcacaccagccaaaatatcattgtgacctgtcaggaacttggtcccagaatgaagaacgaggtctgcgcctagttccaacggtttttgtctcaatggtgtcaaaaaagtattgtcaacgatgagtaaagcattgacttgatgcgcgatctcggcgaccgcagacacatcgatttctgtcatcaatggatttgtcggagtttctaaaaagaccgccgcaatcgttgaactgatttgttcttcaagttcgtttagcgtattgaaatagtgaaaataagcaatctggcgcgcttgtaactcttcaaaaaaacgataactacccccatataaatctcttgatacgagaaattcactgccgcttgggaaaagttcaaaaatcaatgcgatcgcactcatacctgagctcgtgacgattcctcgagcgccattttctaaggtagccagcccagattctaatagctctctcgtcgggtttttggtacgtgtataatcataaccggtactttgacctaattcaggatgcgcataggtggtagagagatagattggtgcactgacagctcccgtcgcttgatccgaacgattgcctagttgtgctaaaaaagtcgtcatatcaacagtcataatcgtattttcctttcttggtttagtgtgctcaatgaagcgggataaagtcgttgtcgcaagattctgacgatagtagtgaaactagttgccttaactgccaaattgttcgttgatgagtagaatgaagcaatcatagccttttgtgaaacaatgaagcaaaatgagctgttttgatcattcgctgtggaaaacctgaccattgatggagggtagaagtaaatgagtacagcagtcactggtttaaaactagcgggcttttcagatcaaccttctttgtctagcgctcttttgtttcactgaaaaaaacattgactaaagtcactgccgcctatgtccgccctcccattcattacctatataataaccagtacgcgttggcagaatctgtaaatcatagggcgtgcgctggtaggtttcgtggatccagttactgaaaaacaaggacgcatgccctcgccagcgattgatgaccgttccttgctggtcggaaaaataatttttggggagtgccgttttgagccctttggctttatctcgcaaatattcttctttcaacgtttctgtatagtattccaaatgccctaaaagaaaactatttttatggtcatgggaaactaagagtgctggaccggtctctattcctgtaacaagcacattcagaggtgcaagtggcagctgcgcctcattgatccccgtataacgagaatggggcatcatgaaggaatcattaaaccctcgtatcagcggatgagcctcgatcactcgctgttcaaaaataccaaaaagtttttgcttatgaagcactttttcgataccataatgatagtacagcccagcttgtgctccccagcagatatgcaataccgatgtgcaatttgtttgactccaagccatgacttcctgaagttcctgccaataatcaatcatttcaaaaggcattttttcgactggtgctcctgtaatgatcaaggcatcgaaacgttcctcactgactgccttaaatgcgacataaaacttgtctagatgagtcgagctagtatttttgctttcatgttgctgcattttcaataatgttacttcgatttgcaaaggactttgggacaaaagctgcaacaattgattttctgtagtgattttttgcggcatcaagttgacgatcgcaattttcaaagggcgaatttcttgtttgatagctcgctcttgttgtaaagcaaaaatgttgtgcttcaaaatagctgctgccggtaattctttggggatgatgattggcatcttctcactcctttttcaatcgactcctatgaacatttactttttattaccttatcgtttctcgtggtttcacctatcgttgcttctgaacatggttggttcagtgtgacttgcatgccatgctttgcatgtcagtcgcagtgattcgagacgtggtgactacgttcccttcggtcccctagtactgttcatcatctgctcgtctactctgtgcttcgcctgcagtcgcttctaagcatagttcgctaagaaggacttgcatgccatgctttgcatgtcagtcgcagtgattcgggacgtggtgactacgttcccttcggtcgcctagtactgttcatcatctgctctgccatgctttgcatgtcagtcgcagtgattcgggacgtggtgactacgttcccttcggtcccctagtactgttcatcatctgctcgtctactctgtgcttcgcctgcagtcgcttctaagcatagttcgctaagaaggacttgcatgccatgctttgcatgtcagtcgcagtgattcgggacgtggtgactacgttcccttcggtcgcctagtactgttcatcatctgctctgccatgctttgcatgtcagtcgcagtgattcgggacgtggtgactacgttcccttcggtcgcctagtactgttcatcatctgctctgccatgctttgcatgtcagtcgcagtgattcacagcaaaaagtcgtcccttttatcgttaatgtaacgataaaagggacgactgactcgtgttaccaccctaattcgtgctgcctttgcaggcgtgcacctcaacagtaccaatgatacttggcgcgttatcgggcgcataccgtctatttggcgtgaaccaaataaaaactcagagctcatcttcaacgcctgtctcatgtctcctttttcaccaaccggagtctctgtaccttcaacgtagcgcttactcttctcttcaacgtttcatctctatttgtaatttctaagaattataatcgttctttcattcaatgtcaatccgcttttaagactttggcttatttctttgaaagatagagatattgttgatccatttgttcatagatttcttgcagatcatctcgtgagacttcacgatccttgtagccataaggatcgttgacatacattttgtctccatctattccagtaataacaacggaatggatcaatgtcgtttcgtagatcattcccgattgcgtcggccactcaaaaaaatcagcattggttggtacttgcaattcaagggtagcaatcatccagataggcgtgccctgctccaaaacttcaataatctcatcaaaagatttgtctcgaccacttaccacttgataggaagcccctaccatctggctcgcaactttggcgattggctctaccgcaacccccattgctccatcgccgccataaatattcccaacaaaaccttctcgtgggtctcctcgatgagtttcatctgcgtaaacagggacatagtctaatttggcagccagctcatttttatttgtatcatacccgtagaaattcaacagcatggataaagcagtgacttcacagccatttcctaaatattctggatcaaattggctttccaatggtacatctaatcgaatcacgggctcttctttttctgcagtcagatccagtcctgatatcgaagtcaccgattgtgccgcttgttcttgcttcttcacataaggagttgctccagctttatcatagaaaagccagataaagaacaaactaaaggtgagcagacctaaaagcaaactaatgcttttctttttcatcagtttactcctttcttctttgactattataccttgaatgtcaaaggaacgaaaagaatttatgttttagaaccataatttaggaaaacaatgcttctcaaagcgttgaatccaatgatttagaccatccctaaatgagcataaaaagaagctaagagaacatggagaaagttcccctagcatttatcattacgctttgtatttgttgtctaattctaagaaaggacttgtttcttttttcctagtaatagtttttttgcgcttgaaaaggaacgaatatcgaactgtttgcttagtgccccggcaacaaaataggctaagttataatctatcaaactatggatcaagccaccgatacccatcaagacaaacaagaagtagtaaaaattgccatcaaacgcggtgcctggtacattgccggtaaaatagaaaacagctacaacaagcatttccacaatagaatggataaggccaatcacaagattaaaggcttgaaaacgagcattgaataatgttggcttgccgttctttaataaaatacttggatttttttgtaaataaaatgccccgatcacggcaaaaacaacgtgcgacaatgcccgcaaagcaatgatcggcggtaatgtgataaaaaagccaaatgtggtacctaaagctactgctatcgccatccctggtgaaaagaacatcgccacaaacaatggcacatggctagctaaagtaaaggaagccggcccgatgacgatcttgggcatcaccattggaataacgattcccataccaatcaaaagtgctgcaatcgttaaatgacgtactgaatgtttcttcatgaataattcctccttcaatgtgtcttgacacatttatctcgctcattgtagcttgaaaacaccaaggtgtcaagacacaaaaaaacaggacgatgacctaagtatgaacagacaaaaatacctgaaggagataaggtagcgaattctgttaaaagtgccccttgaaccaacgatacggttggaataggtcctttcccctttccttcagatattcagtttgttgcctcacttatgccacagcccctgctgtttcattattcatttatttcaagtccctttttgtgcgccagcatttcattgctcaaacgtgcgaattctgctaatgacaatgtctctccgcgacgagttggatcaatttcactggcagctaaactcgctttaagccattctttcgttttttcatcttttccataggaattctgcaggttattccacaacgtttttcgtcgtaattggaaggctgccttcgtcaacttgaagaattctttttcatctgttacttcaaccgcaggagttgcacgacgagtcagcttcaagattgcggaatccacatttggttggggcacaaaaaccgtcttagggacaatgaaagcaagctctgcttccatgtagtattggacagcgatcgataaagagccatacgctttcgttcctggaacagctgaaatacggtcagccacttctttttgcatcatgacaaccatttcttggattggtgcctgtgattctaagaaatgcatcatgatcggcgtcgtaatatagtaaggaagattcgctacgactttgattggccgttcatcggtaaaagcttctctgatcattgtagacaagtctgcttgtaaaacatcttgatgaatcacttgaatgttcgaataaggagccaatgtatcttgtaaaactggaatcaaacggtcatcaatctcaaaagccaggacttgacgcgcatgtttcgccaattgctcggtcagagcgccgatccccggtccgacttctatcacatttgtttgatcatcgattgcagcagtcgcaacgattttgcgcaaaatattaggttcagtcaagaaattctgccccaggctctttttgaaggtaaagccatgttttgctaatatttctttcgttcttgatggggttgcaatatccctttgttctttcacaattcttcctccactatcttcattgcttcagccaattctgtttcagtaatacgaaacatggcaagacgtttttccaactgtttggcattcgtataaccgattcgtaaaacatctccgagtttttcccgttttgctcgtgcttgctcaccagcaatcagtccatagcttgctaaaacttgacgagaaattttctcactctcgtcttcatcttgttgactggctggcgtgacgactttgcgaagtgcttctctaagcgcttcatcactagcgtgttccacacctaaactgccctttttctttggtgcagcttggcttcgaggcaaaaaggcatgttgggcagccgggacagcttccattatgattttacgaattttttcacccgaaaaatcagggtccgtaaaaacgatcacgccacgagtctcttgggcatgttcaatttgacttaagatggtttcgtcaatcgctgatccgatcgtttcaatcgtatcgacatcaaacacttcttgcaatcggcgcgtatcgtctttcccttcgacgacaatgatctcttcgattctccatctatccttcataaaggttgaacaacttctcagcattgatacacgtttgcttggcgacttcctcaaaagacatctgacgcagttccgcgattttttcgactacatagcgggtataccctggttcattgcgttttcctcggtaaggcattggtgcaagataaggtgcatcagtttcgactaatagacgatcgatcggaaccacttgcgcagcttcttggacatccaacgcctttttgaaggtcactacaccactaaatgaaatgtgcatacctagatccaaaaagcgctttgcccattcgccatcaccactgaaactatgcatgatgccgccgatatctgtgattttttcttcttttaaaatctggtacgtgtcttcgatcgcttctcgggtatgaatactgataggtaaatgcatctctttagcgatcgcgatttgccgacgaaagacagccgattgtacctcttttggatcttccatccaatgatagtccagtccaatttctcctaaagctacaactttgggttgtgtcaggcgctcttggatgaatgcctcaatctcttttgtgtaagatcccgcttctgttggatgccatccaatgatactgtatatcccatcatattcttgacttaatgccaatgacttttcaatcgtaggttgatcaaatccgacaactgccattttcgttactcctagctcgtgagctctggcaatcgtttcgggaatctcttcattaaattgttctgcatttaaatgcgtatgtgaatcaaaaatcataaaacttcctccttgtttcctctatactctagcatattttgcggctttaagaaacgaatccttcttgttttttcatttgctaaagaaagttttcagcaatcaagaaaaatcagcccaaaggtggagggagaaaaaaagccagtcgattataatagacctatgatccatcagattcggaggtgaaaagatggaaaaatcaaaaccatttacaaaatgtactttacggcaacgctatcactattatcgtcagcaaaatgctcatcaacaatttaacgggaattttcaacaaaacttccaaaaagatttcccaagttttgctaactggcttaaattgcagcaaaagccgattgccaaagatcaaacagcgacattttctcactggttcttactgattctatttagtttagtgactgtagccacatttacccaacagctcttatttcttttatttgtttttgtcattgcagcactagtcaaaggtcctggaatgattctctggggagttgtctattcgtttctagtgacactctttcctcctcttggtttgttgctttcagcgcttttctttctgctcactctcaggcagttgacaagaaacttgacctttatttttacagctgtgtacttttacagctaccctttcttgatcacagcgattcatcattttacaacattcgatgatcaatggatcatgattgcagcggttatttttgccttgatcagcgggcatcttttgtttaagcgaaattatcagtttgcctctagtaaagcagttgcttggcgactgatcaccactccttatgattgtttgactgcattgattccttcaaagaaaggacgccgattacaacgactgcgaaacaaatgatttttcggaacctaaagcttgattccacgctgacattgaaactgatttgccaacatttaagatccatgcctagtggaaaaggacgcggacatgaacacttagacttcctacaaagggcttctgcaatgcaggagcccttcgcctattatttaagatgtgcttgactgctgctcttgttatctaagctggatattttcatcgttaaacaaaaacaatggaaaaagtaaatttgtttttttattttttgaaaatcaataaaaaaaaggaaaaaaatttttactgaatgtcttttgtttgattgcttttttggggtgaatctactatgctattagttagctaaacaaaaaaggagacccgctatgctgaccttcatttttatcttttccttccttgtgggcttgcttttttacgcctttattattgagccgcgccgattaaaacagcggcattatttgatcaaaaaagaaaagcaaacggtccttgatatttccaaagcctatgatctttatcaaaatgaacagaatgtagtagtcgcacatatcagtgatctacacttttctcgttggttcaaaccgcaacgcatcaatcgtatcatccgttccacgatcttaaacaaacctgatttgatcatcatcacgggtgacttgatcgacaattaccgtaagtggcctcaccgttcaaccagccgcctcattgaaaagttaaagaaattgaatgcgccaatggggaaaatcgctgtattaggaaatcatgatcatttgaatgatgggcaatattttgtgaatgaagtgtatgaaaacgccaatttcaccttgttggacaatgaatctgtatttggttctgatgagaaaacctcgatgaatatcgtagggatcgatagtgcgagcaaaagcgcccactaccattacgagccaaccttagcagaatggcagattctcttgatccatgaacctgactatgtctctcgagtagacaacattcgtgactatgatctcgttctatccggtcacagccatggaggccagattcgtgtgcccttttatcgtgcgaaaacgaaaggcgccctcaaatacacagatggtctctatcttttggccgcgaacacacttctaagtgtgtccaatggtgtggggaccacggcgattccagcgcgctttgctgtgccgccagaaatcacatactatcatctcgtgcccgccgaaaaacatgctgtagcctaaaacaagctcttaagtgatcctcctatctcgtttggatagttaggatacttaagagcttgttttcgttattggcgtaatccgttatagatcgtctccaaattccacttcatcatcgcataataactatcgccatcttgtccaggttcagcgatggagtctgtaaagacagtgccgtagatcggaatacctgaatcccgagacacgctttgcattgggcgagtattaacgctactctcgacaaacaatgaaggaactgccgatgcttgcaattggtcgactaaattcttgatctgagcaggcgttccttcttcttcggtgttgatttcccagatataagcggatggcacaccataggccttcgaaaagtacttaaaggcgccttcacttgtcacgatcaatttcttttcttcaggaattgaagcaaaattatctttcgcttgttggtctaattcggaaagctgctgcagatagtgttccaagttttcttgatagaccccctgatttgcaggatctttcttactcaattgttgggcgatatttcgcgcatagatcatcccattttccaaattaagccatgcatgaggatctgcctttgtatgatcagcatcatccgatagatacaggacttctacgccatcactgacggcaaaataatcttcacccgcttttttgttggcgttgttcattaatttagtaaaccagccgttgccgcccgtctctaaattcaagccattataaaatagaatgtctgcatcagtggctttttggacatcttctgacagtggttcatattcatgagggtcacgccctacaggaacgatgctgtggagattgattttgtccccagcgatgtttttggtcatatctgctaaaatcgaattggtcactacaacatttaatttgtcatcaacggttgccgcctgctctgcttgctgataaatcaagaatcctcctgcaacagcggcagcagaaaccattgccgtggtcagccagcgtttggcaggactcgtttgttgttttggtgaaaagagaaatcctaagacaaacaaaatagctgcagtgaggacaatgcttgatccggctgcaatattaaaggaataaccgataaataacccaatcacagaagaagcaccgcctagaatccctgcaatcaccatcatatggctaaggcgttttgtaaataaataagcagttgctgctggcgtaaccagcaaagctacaatcaagatcgtaccgacactttgcatcgcagtaacggaaactagtgtcaaaagcagcatcaacaagtaatgatatacctgtacattcattccaaaagctttcgccatcatcggatcaaaagaagtgatcagcaatggccgaaagaagatcataatcagtgcaatgaccagtaaagcaatcgcaatcgtgacccatttatccccctcttggactgcgagcacatttccgaataagatatgaaacaaatccgtagaactgttagctacgccaatcaagatcactcccaaagctaaaaaggagctgaaggtgatcccgatcgccgtatcacttttgatcaaactattgttagaaatataggtgataatgatcgatgcaagaacaccaaagaaaattgctccaacaaaaaagttcacccctaaaatataggataatgctactccgggaagtacggcgtgagaaatggcatctcccatcaatgacattccccgcaaaataataaaacaaccaatcacccctgcaacaacaccgatcgctacggcggtgatcaaggcattttgcagaaaatggtaatgaactaatccatcaataaactgactaatcatcttaagcccctcctttcacgatgatcgtatcgccgaatgtttctttcaaatttgtttcagtaaaaacagtcgtcgtcggaccatatgcgattaaatgctgattcatcatcactagttcatcgaagtattcagtcactttgcctaaatcatgatgaacaataaaaattgtctttccttgttggcgaaattcacgcagaagtcctacaataattgcttcactcatcgcatcgattcctacaaatggttcatctaaaaaaatgaattccgcttcttgcagtaatgtgcgagcgatcaatactctttggaactgaccgccagatagttcgccgatctgccgttcagcaaagtcagccatttggacagactccaatgcagcggcgactttctgccaatctttggccgttattcgttgaaacagagaaagctgcggatagagtcctaatgacaccacttcttttactgtaatcggaaatgtataatcgactgcagtcttttgttccacgtaggctatctttttttggaacttattgagtgccattccattcgatgtgacatgtccttcagaagggatcagctgcagtgcagctttgatgaaggtagattttcccgcaccattcggtccgatgatccctacaatggccggcttatcaacacagaaagatactccagagacagcttgatttttcccatcatagctggcggaaatttttgaaaatgtgatcatagtttgcgctcctttacatttatgttaaagtatcgtttatttattttttaggcatgcctaatttatttccaattataccgattctcctgttgaatgcaagggattttttacacaaataaaatccaattagaaaaaataaagtgtcccttcaactaccttgcccctagcagatcgttttattcattcgccgttacttttagtgtgaccaaacaaaaaaagtttccactcctttgagggaaactttttaaaagaaaactttctaatcagcattcgctgtttttttcaaaatttgtgatgaagaatcaacctggagtaccaattgtcggcaatatactcgtcactactcagacactacgttgactggttgattctctaagaaatgcttataatttgagacagcgatagctagcaatcgttgccgggtctctaatggtgcccacgcaatatgcggcgtcaaatagcagttaggcgcatgcaacaatggattgtcagccgtgattggttctttcgaaacgacatcagctgccagagcagcaaattgtccagctgacaacgcttctgctactgcttgttcatctagtaatccaccgcgagcagtgttgatcaagataacatcctttttcatttgagacaatgcacgggcgtcaatcatcctctcagtatcgggaaattgcggtacatggagactgatcacatctgcttgttgaaagagtctctccaacgaaacttgttctgcccattcagcctgcggcgtttttggtcgatgattgtaatagatgaccttcatttgaaacgcatgagcaatttcagcgactgcctgagcaatcgcaccatagccgatcaaaccgatcgtcttgttggcaatttcagtcagtggcgtttgccaataagagaaatcgggactgttttgccaatctccttgatggacggattggttgtgccgccctacttgattcgttacctcaagtaataaagcaaatgtagcttgcgctactgaattcgtactatagctgggaatatttgtgacggtaatcccttgagatgctgcagcttgtaaatccacaacattgtagccagttgccagcacgccgatataatcgatgttagggcatgcttgtagtatttcctttgtaaggggcgttttgttcgtaaaaacagccgatgctttgccgattcgctcaatgatctccttcgtatctgtataggaagtgcgatcataaatcgtgatttcccctaatccagctaatggctgccaatctaaatctcctggattcaacgcatagccatctaaaacaacaattttcatttttttgctcctctctgttggaaataaaagactggaatccctaaacaggtgatcaaaataccgatcaatgcaagcacaggggccgtaaggatcgtcattattaaaatgaatccgccccctaaaagagcaatgatcggtgtgatcgggtacaacggaaccttgtatggacgattgagctcaggtgctttttttcttaacaagatcacacctacaaacaataatacactaaaaaaccacatcacaaaaatcaacatatccgttaagagatcaaaactacccaacaacatcattaaacacgcaattgctaattggaaaaaaaccgccgcataaggagccttggttttatttgtcaatttaacaaaggtcgaactgaatggaacttcattctcgagtgccatggcataaggcacccgcaatccggtcatcgtatacccattgagtgcgccataaactgaaatcaaaataccaatcgtcactagtttgcccccaaaatcaccaaataactgcaatgcggtttctgaagcactatttaagtttccagcaatctgttctaagggcaatgttttcaagaaaacaagattgatcaggagataaaccaaggttacaaaacttaatccaaagataatcgctttcggaagatctttttccggccgcttcatttcaccagcaatattcccaacacctaaccagccatcataagcgaagagagtcgctagtaatgcactgctgattcctgcaatgatcgaaccatcacttgttgtagaaaaattgattaccgagactgacactcgtcctggtgtcatcaatcccactaaaacgatcaatgcgatgggaatcaatttgattgataatgtaaatgactgtacgcctgcggcggtttttgtccctaatagattgaacaaactaacactggtaccggtgatcaacgatagcggcaagagataacttgcgggcaaatgaaacagattcaaacactgagtggcaaaaataatactcaacgctgctatattggcagggaaataaataatgctttgagcccatcctagcaagaaagaaggcaatttcccgtaaattcgttcaatgtagcgaataggaccaccagtttctggtattgctgttgctagctccgctaccgttagtccgccacagatcgtcaaacagcccgcaatcaaccacacaagcaatgttaagccagaggattgcgtatgttggaccactgcagccgctttaaagaacaccccggctccaatcacagttcccatgactgtcgaaagtgctccgaaaaaagtgatttctttctttagttgactcttcaaatactcacgctcctttttttgactaaatcaaagtatagcggatagatgctttgttggctagagtgattcgtttggaccacaaaaaaacagctgcttttcaacagctatccctcttatttatttactgttgaaaccaaaacttgtgtacgcctttggtgcattcgtttcactaagaaaactgcaagcaacaagatcaaaggaaagatccccgctcccaaaattccttgctgcaaacctttgtcgctgccttctgccaacaaaccgaccaatgaaggtcccaatgaacaacctaaatcacccgctaaggctaggtaagcaaacattgctgtacctccattacgaatgtattttgtcgttaaactaaaaattcccggccacaatataccgacagcaaatccactcaatccacaaccgataaagcctagaattgggacacttgataacccgatcagcaaatacgccaccaagcatagcaataagcttgcaaacataaatttccgtagatcgatacgttcgccaaatttcccataatacagacgagcaagtcccatcatgatcgcaaacaacattggtcccgcaagatcaccgaccgttttggacacaccaagtccttgctctgcaaaagtggatgccgattgactaactgattgttcacttgccccggcacagaccatcatgactagaaacagccaaaagcttttcaatgagaacagttcacgattcttcagtcctacttcgccttctgctacgattggtgctaatggaacttgagtaaaaacaaccaaattgaccagcggcaaaatagcccagatcaatgtaagaaatggccaacgagcaataccgaagacaaagaaaaagagtgttgagactaagacgaccccaacatatccccaacaataaaacgaatgcagcatactcatggttttttctttattcggggttggacaagcttcgacgattgggctcactaatacttccagaagtccgccaccaattgcatagaggaagactgccgtcaataaaccggtaaaaggggtcggaaagataagtggaaaaacagccaacccaatcaatcctacagccgcaaaaaaatgcgccgcgacaatcgagatacgataaccaatccgatcgacaaaaaagatcgctgcaaagtccacacccagctgcgttagaaaattaaatgtaaccaaaagcgtgatttgacttagcggaatctgatactgtgtttgaaatgtcaaaaataataaaggtgcaaagttattgatgattgcttgaacaatatacccagcaaagcaagcaatgatcgttcgttgataatttttcatttttacctcctccagatttgtttagtatagcaagagaactttcacaatcgccatggaaaatgctattcaaattgctagagtatgttctcttttttggtgtattatcagttgaaaattgctccctactggtattgcaagtcagatctcaataaagttagtggtgataagtgctagtatcataaaaaaaaacgaatctcccctgccgatttcagcaatctggaaatatcgtttttttttttgaaacacaacgattgaagatctctactggctgaagatccttggtcattgtactaattctgtccaaaagttcttttattttgaataagttgtccgaaaaggattatacttgcgcttttcagagacagcagattagttggaatgtgctgccagcattttgactgtggcttcaaaaattggtccaataaagatgatacagagcaatgtaccgataccgacattggcacccaaaccaaagccaatcaagaccatcgctgcatccaagccgatccggatcgtcttttgggtcagcttcgtacgtttataaatcagcgcagttagtgcttctaatgctgctgatccttgatttgaagagacatagatccctgccccaacgccgaacaagatgggggcgatgaaaatcgccaaccaagaatagaatggcaaatgaacaaaaatcttatccataaccggctcaaaaatcccaatcagcaaaccaagaccgatcccattgatataactgccgattccaagctcctggcgatcgaaaatagctacgatcaataagacgaccagattaaaacatagactggcgatccaaaacggaacagacacatgattcaagattcccagcaaaaatgtactgatcgtatcatacccctgatgggcagtgatcagcaatgaaattgctaacgcaatcaaacacgtacctaacaagatttgccaaatttttttcacgacatcactctcttttccaatttagttttctagactctcttagtgtaccttgccgtttcagagattactactatttcttttatctgtctaaaaaacccttcaagcggtcaatccagtgattcgtaactttgctcatacttctctcgaaattcttttggcgtcagaccattcaatttcttgaacatctttgaaaaataattcgtattattgtatccgatcacatcggcaatctcattaattgtttgtctcgtatgcagcagaagctgctgagcttttttgatccgaataaaattgacgtattgattaaagcttaattccgtttcttttttgaacacttgccccagatagactacactaacatgcagagcttcggcagccgatttaaccgtcagctcttgtgtatagtgctcttcaatcatgccaaccgctttttgaacaatctcagaataacgcttttgctgaggctggtctttggccaactgcaaaatctcgttgaagagctgacgcagtacctggatcgtattcgatgctcgaatccgagtgatgatccgatcataattttctctagtcaaagcagggaactggcggtaaatatcattgaataatagaaaggctacgtaacggacatgctcagggtcagcctgcatcccctcgagacttgaaaagattttgtctaattcatcttgaacggtttttgtatccccgatcgtcaatgctttattgaaagagagaaaaggtagcgcttcgttgcggtctaagatatcgacttgaatgatttgttcattaagcagcaaatccgggtaaaagatctgcagtgattggacttgcttgattttctcataccctttgtataagttttcccattcattgatcgtttcactgaccaccaattgccaatttcctgctagaatcgctgacagttctttgagcagacaccagagacgttgacgttcaccataaaaaacgatcagcaactgattctctcccaatcgtcctggcagtagcaatggctgttctttttcgacaaaaaaacgaaacccattttctaagatttcaggtgtccctgtcagctgtagaatcgtataaggcggatggatgggttgtgtggactgttccaataataagtggtactcactttcatttaattcatcattcagccaaagcaacaagctggattctcgatacaagtcattttgttcatcgattcgttgctgatgtgccagttcctccgcaattgcctgcacactttcatagagttcgaccttgttgactggcttaacgagataatttcggactcctaactgcatgccttgcttcacaaatgcaaattcttggtaaccagataagatgatggaaaaaaaggtattgccttttgcctgtgctttagcgatcatatcaatcccattcatttccggcatgcgaatatcagtgatcagtagatcaatggcttgtgtttctaaatattccaacgcttcagaagcgcttttagctgtgtgaacgacttcaaagcctaattcttgccaaggaatgatcatctttaggccttctagaatcatgtactcatcgtccacaaacatggctttatataaactcatcattcaacatctcctcatcgatcgcaatggaaatcttgaatccgtgatttttttcagattcaacttccatctgataatgatcgccaaacatcccccttaatcgttcatgaacatttttcatgcctatggatgtttgtacgacgactcggtcatctgcaagctcttggcggatcatcgctaattgctctggatctgctccttttccgttgtcccgtacttgcaaaagaatcttgccattttgtcggaaggctttgatactgatggcattatcatttcgctgatagtcgattccatgcacaaaataattttctactaaaggttgcaaagtgaacttaggcaagagcagatgtttcagatcttcttcgatagttacgtgataggcgattttatccggatacctcatttgatacaagtaaacgtatttctcacaaaacgtcacttcttctgccaatgttttgatcttttcctgtgtcgtattgttgcgcaaaagtgccgaaaaagcgtatacgacatccgctaattcttcctgctggcggctcaatgcgtacatccgaatgtattcgagtgtattgtataagaaatgaggattgatctgagcctgcaatgcccgcatatccgcatcccgctgcttgatttccagggtatagatgtcctcaatgtagtcattgatactgcctgtcatttgattgatcgcctcggcgattgtttttaattcttgttgaacccccgtggtatcaatacgctcattaaaatctccgtgactgactttttgggttgcttgaacgatctgtttgacctgctgggtgtaacgcttgaacgtacgatgcaaaatcaatagcagcacaaaaagaatcaacgtaccgcaaccaaaaatcaacaatgtataatttaggacatcccgccaaatcgcttgcttatctagtaaaaccagcgtgatttctccgttgatattcccttgtttttttatgtaaaaatcatgggacaatttcggcacgatctctttttgattattggccattgcttgatcgattttgtcgatcatcgcctgattcagattcggtgcatctttatagagacgctgtccactgcttgtgtatatgaaacttttgataccgtgttctctattttcatcactacgattagctaatacgttttcttcattaaataccacaaacacttgtcccattggttgcgcaaaattactcggttgtgcgatcgatcgcgcaaaatataggcgatttttcaattggatctggtcgccccgcagtttctctccgtaaggtctgtctggtgtagcaactaaatattctttgctttcatccaattgaacgatgatttcttcaatgtcaggatgactgctgatcaaacggtaaaggatatttggcagataaatattttgtcctgattgtcgaaacatatcattactataggaaaaataatcggcgatcgataactgtaaatagttgcgcaatgattcaaaggtggcatccgaactggtgaattctcctaatacttcagaaacaatcgtattacgctcttggatatacgtatctaaatacgtgcttgttgcatcgacgagtcgattactcatccgaaaccgatccacacccgtatagacactcaaccctaacatgatcaaaatcgaaatcagaatcaacaaggcactataaagctgcatcaattgattgatcaggaagtcacgcttgaaaagggctaagattcgtttattcatattgcagttttccatcgatcaatgcacggtctttccgggaagcggaatggacccataataagatcaaactgaaggtaccaaataaaaacaatcctttcatgctccaagtaaacaccaaaatacctacgagaccaaaaatgactttagcgaaggtgccaaaatttagaaataaactgacaaatgccagtttgatcgtattcaataaagaggtttcataaattgattcaaacaataaactatacaaatacagtaaaaccaagagaccacttactactactagcaaaaagtcgatcatcagccacagtagtccttggatctgactggagagatacaaattatacgctgcgatcgccagcaaaccgaaaaataaataaaaacgggcgttggctcgccaaaagttttgcttccagcatcgaaaggccttcctaaacgtttggtcctcgtaagataagccctcttcttcgatcaaatcactgatggtttgaaatgccggaccaaccccaaacaaaactgcgcccatcattgtaaacaatacgaagaaaagattcagtttaatgaccgcccaaatcagacgaaaggcctttactaatcctccacttgttgtctctttcattctttctcatcccctcttggtatttgcccgttttattatagcgtttttttgtcacttctcaaaatgcgaatctttactttttctgacgcttatcgccgcttattctatcttattctattatgtacaacaaatgaggagtgacgaaatcattcatcggctactcctcatctgctcctacgcgcagttgctccgcttattttaactaattattttccagattcacggtattcgtcgaattgtttttgcatttcatcacgaactttgtcccaaccagctgttttcaattcttccactagttttggcacattttcttctggatcaatcgtccctgttgctagacttgctttataacgattcatgacattggcgatgttggtgatttcagtcttcacactatctgttttaaagttgaaacctagaatcggtgattcttcggctttagcaatgttttcgtcacgttctttgatcatttcatcagtgatcgattcttgcgtatacaagatcatattgttcccagtattccatgccgccatgtgagtgtttggtttgtaaccatccaacaatttgattttgttatcttgcccttccactttttcccatgcttctccttcaacaccccagacaagtccattcaacaattcagggtcgctgtttaacaaaccaaggaattcgacagctttttctttgtttttagaaacatttgccaccacaaagttcgccatttgggcttgccctgttgatttcaattgtttggtaagcggacgagaaatcaattcgtgaccggcagcattgttcaaaattgtatcgccgtaatccattggtccttgggtttcttcacgcatgaaccaagtatttccttctaatggatagccagtggtattggttgcggcatctgttgggatcaatccttctttataccatttgtgcatcaatttcaagtttgccatttgttcgtcatcttcatatgggttgatgatttttgtagtgtctccgtcaagtttgaccgcaaatggatagtctttccccatgacatagtcatagtttcctgaaatgttgaaggtttgaccaattgcgaagctggcaatattcggttccttctcatggaattttttcaaggcatcttctgcatcagcataagaattgatattgctgatatcaatgtcgtatttatcgagatattgtttgttgaatgtcaatacttgttgtgcatacacgtttccattaacaggaaaggcatacagcttgccatcgatggtgttgcctttgatatatgcttcatctaattgatcataagcttccttagcatattttggtgcgaggtcggtcaaatccgcatatgctcctttttgggcatttgccacaaaattagatgcaaaagagatatcatagttctcgccagaagaaatgatcgtactcattttttgatcccaatcgccccagccaatgtactgtaggtcgatccgtgcattgattttttcctcgatccgtttgttggcgatctccatcaattgatcaaagttctctggtttgtccccgacttgatacatcaacaaagtctttacgccatccgcactattagaatcagaatccgacgactccccgtttgacccgcaagcagctaagctcaacagcattgctgaagcgaatcctgcaaacattgtttttttccacgatttcatttgttttcctcctatatccttattattctttgacaccgccaattgtcaagccacccacgaaatatcgttggaaaaatgggtaagtaatggcaattggtaatgttgctactacaacgattgccatccgagcagtctcgtttggcaatgcggccaatccaccttgaacttgagcagccataccggtacttttagctaaataatccaagttcgattgaatccgcatcaatagtgcttgtaacggcactagtgaatccttttgaatgtataacaatgcattgaaccaatcattccagtaaccaagtgccgcaaataaactgatcgtagcgattcctggaaccgctaatggtaagacgatcgagatgaaaatcttcatttcgctggcaccatcgatccgagctgactcaataatactgtctggcacagtcttcttgaagaaagtccgcatcactaaaatattgaaaggacctaatgcaatcggtaaaatcaatgcccaaatcgtatcttttaattgaatcaaattaaccattactaggtaattggctaccattcctggggcaaaaagcatcgttaccaatgcaaagagcgtaaagaatcgccgaaatgggaaattggaacgagaaatcacataggcatacagtgaagtcatcgttgcattgatgactgtcccgaagacggtgataaagacggagatcccaaatgcttgaaaaatcttgctgctcatggcgccactaaagagatagctataggcggcaaaagaaaattcaccgggccaaaagcggtagccattctcagctagcgaggtttcactcgtcagagaaattgcaattacaaataaaaatggtaagacacaagaaaaggcaaatagcgccaaaacaatattgaaaatcaggttgaccgttggattaaaggaacggacttcgacctttgctactttctttttcattcgtccatcctccttagaataatgctgaatctggttctaatttacgtaccactaagttggcagctaagagcaagcacatacccactacggattgataaagtccggcggcagcagtcatgccaaagtcacctgtggccgtcaagccgttatagatgtaggtatctaaaacggaagaaacttgatacaatgcacctgagttgcgaggaacttggtagaatagaccaaagtcggcccggaagatcccaccaatattcaaaatcaataagacagagatcatcggcaataattgcggcagtgtcacgtttttgatttgctgccatttattggccccgtccaccattgctgcttcataataggtttgatcgatacccatcaccgatgcgtaataaatgatactgttgtagcccaagctcttccagacgttcatgaaaacaaagataaatggccaccattttggatcggcataccagttgattccttcaccacccatgttggtgatccattgattgataattcccttgtcagggctcaaaaaggcatagacaaaataggaaataactacccatgaaagaaaataaggcagcaatgacatggtatgatacactttgaccaatcgcttgttccgcaattcactcatcacgatcgcaaaggcgatggcaaaaaatagattgaatgctagaaacacgatattgtaaagcaatgtatttctagtgatcagccaagcatcatttgatgcaaataaaaatttgaaattatcaaacccgacccacgggctctgttgcagactggcaaaaaatccgtctggtgaaagacgaaaatctttgaatgcaacgacattgacaaatactggaatatagaaaaaaaagatgaaccaaatgacaccgggaagtgccattaagataagtgctttaaattgccacacatttttccaaaatccctttttcttcacatttgatcaactccttctgctataagaataacgctttcattgtgaataattaaggaacaaactaaagataaaaagaaacaaattaaagattttgtcttttctattatcttttgtatgattttccccatcgatcaaaagacaatttttcttcacaaaaaaacaagcagcacgtattgctgcttgttttactttttttattgggcttcttttcctaataacagactgccaataatgccgcttttgttcggcagcccccaagcaacaatgtattctgtgactgtcggtgtttccatgtaaccagccatttgctcagtaaactgatcgtggattttcgtcaaaagatgcggttggttcatcactccgcctcctaatacaattcgatcaggggcaactgtcaaagtgatattcacaagtgcttgcccaatataaaaggcttgtaaatcccaaatctcatgatcttttggcaaatgttgtcctttgatacctgtccgtgcttccagtgagggaccagctgctaacccttccagacaatctttgtgatagggacaggtgccgacataatcgtcctgcggatgccgtttcacaaaagtgtgcccaacttccggatgacctgcgccttggaagatttcctcattgattacgattccagctccaataccagtgccaatagttagatacacgcagctgcgcattccttgtgctgcaccttgtttgagttccccaaaagccgcagcattgacatctgtcgtccaggcaaaacgagtggcgggataccgttttttcaaagtccctaaaaaatcaaactgctgccagccttttttgggtgttgctaagattttgccatacgtttcttgttgaggatcgatcccaatcggaccaaatgatcctacccccatggtggctaaggtgtacttatcaaaaaaagcaaaaatagcagccatcgtttcctctggtgtcgtcgtaggtagtgagcactcatcaatgatagatcgttcatcagcgaccgcacaattcatttttgttccaccggcttcaattgcaccataaaacatctttttcactccttcaaaccgattgttcgaatttcataagcagccagtgtttctccaactgattgaggctgttcttcttccaacaaattaagcaggcaacgatctgtcttttctttcttcgcgacaaaaggtgttgctgtatcggcaagattgtaccctcttagaacgagcaagtcatcttggcgacgacgtttaagagccgtgatcgccactgtagcgccattggcttccacgaattgtgactgtttttctaatagacctgagtggatggctgtttgccgggcgatccaaggcacttgagctgcttgtgcttgtcgataggtttcgtagcgttcgttggcttgagcatgcaactcaatcccgtactcaaacgtatgcttaccgatacattgcgcttctggtgttgggaaatagccccaatcgccaagttctcctgtgcatcgtaacaacgtcaaacaaattttgtcttctacgatctcgtattcatttaatccagtattggaaactgtgacgccgaaatcttcctcatgtaaattaacaaatgcgtgttgatgctgcggatttgtcggattttgccaatgactagagacttgattcggccttctaactgcttcatagatactatcagcttcatgttgatccgtatggatacccgtagggaaaagcgcccgtaaccggtggtctttgctttggttgttcactgtcgttttaaaactgattcgtttactgttgcagtccaagcgaatttctgtttccaaggtaaatggcactgtttgttgcgccctttgtgctttacggaaacggaaatcaacgactgctttttgttcttcaagtaattgctcatcagccgatactggaatttgcatcatctgcgttactttaacgacgccataaagagcagaatttgcgatgacctcaatttgatgaggaaaagctgttgagtaaatggcgcggtccccttcaggttgtttgaaaatatactcattgccgatatcgccaacatcttcaaaaaccaataaatccgtcaattctttcccggttgctttttctttgatggtcagactgccgtttgaagtgatcgttgcttggacaaacgcgttttctaaaacacgaccatctgctgaaacgattttttctgtcgtagatgctacttgtggcttgtcagcctcaatcagtgcaaaggtctgccatgaaaattccggcatttgatccatttggacttgtacattgacaaaacgcttcataaaaggaatccgaaaagcgtctttcggtaattcatagtcaaaaagcacttcttcttcgctgatttttgccggtaagatctttccttcagaatcaatgatttggtaagaacctttaggctgttgctgcaactcttgatataaccggctaggaagcccttctcggaatgttttccggctcagttctacttccacttcaacgatgcccgaacgtgtcgtccctgaggtattaaagactacaaatggtcggctttcttttggaaaagcggaagtatcgatggcatttagcaactgtgctactgcttcatcagcgacatatttgccgatttcattggctttttcaaaccgcggcatcatctcccgatgcacttcgtccaccgaacagccacaaatactgtcatgaggatgattttgcatcaacagtttccaagcgtggtccagcacatcgtggggatacttcttcgttacctcatacgccatcgttgctaatggttcagccacattttccaattgacgtgagacgcgcgtattccattgtttcaaataaacccgcgaggaggccgtgttggctagcgtataccagccgtctgtctcttgacttgtcaattcgccgctcacggtcccaaggtctgctggcaaatccgcttgaactgctgcaaggtattctgtgaacccagcatgcttgaattcataatcagggaacaattcattcgctaagcggatcgcttcactgatatttttttggacaggctgatgatccaccccattcatcatcaagtaatgatttgtcgaaccaaatttctcaacatcttgcaatttttgagtccaaaactggtgtgcttcttcccgatcaaccggaatctcattgccattggaataccagttggcaaaaagtagaccaaagatctcactgccatctggacctcgccaattcatttctgagtattgggaggtaaactgatcatccggtaaaacttcgttatcaaacccgattggcttaactcctcgaccaaaagctgcactgtgtaagttggcttgcttcatcatttgcggtgtttggcccatattcccgaatgtatccgggaaatagcccagcatgacgggtgttccccattttttgctttcagccatcccaatcaacatgttgcgggtattggactctgaactaatcaaaaagtcatcttgaagaatataaaagggaccaatttgtaattttccttgatcgattgctcgtttgaccgctgcccgcttttccggacgaacttccaaataatcatctaggataatggtctgaccatctaaatgaaaactgtggaactcaggatctttctcaaacaattccaatagatcatccatcaattcaatcaagcgcatatggtgttgctcataaggcatataccactcacgatcccaatgactatgagatacgatataaatttgttttttcattgtctaactcctctcgtttttgccggagatgcttatttttctactcgaatatcaaagtaatccatgacaagctcacaaaacatcatattggcccatgagaaccattcccgggtatatttcgtcggatcatccacatcgaatccttcatgcatcaaatgggtgccagcatcggttgcaactaattgattgaggattcgttctttctccgccttatctggtgtcgtcatgccttccattgccatcgcgatcggccacacatagttttctggtgtatgagagcttccgattcccttcgcatattttccttcatagaagtaaggattttcggaactgagcaacgttttgcgtgtggctaaataggtttcatcttgatctgatccgtaacctaaataaggggcggcaaccaaattcggtacgttgctatcatccatcacagtggcattgccttgaccatcgacttcataggcatagatcgtttgacccgcttgattggtggttttgccaaacgcatcgatccctgcttggatctctgattggagctgttttgcttgagtaacaatcgctggttcattcaagatagaactaaaaatctcaacaatgtagcctaaaaccactacagcaaacatattcgaaggaaccagataaccataagcacatgcatcgtcactgggacgaaatcccgaccaggtcataccagttggtacgacaggcgctcctttcccgtcattgatcaaggtatcttctttacgccatgtttctctctcaaagcgataaggagattcttgatgattttgttccgtggcaaaaacatgaagggcttttttgataccgctcacaaaatcgtcattaaactgatctgttctgccagtattcttatacaacaggtacgccaattgaatgggataacacaaagaatcgatctcatattttcgttcccagatccaatcattcatctctgtcaaatcgctttgatgcccggcgccatttgctgcttcattaaaggcattggcataagggtcgatattgatataaaaaaattgcttcttgactaatccgctgatcatcgctgccagctcttcatcttccttggcaattactaaataaggccgtacctgcgcggttgagtctcgcaaccacatcgccggaatgtcccctgtcagtagaaatgttgtgccatcttcatggcgtttgaccgttgtcaacaatgtgttagcaaaagcagcattgaagttttttgcccaatccgcatgttcacttccgcaacgttcggttatttcctgcataaagtttgcaactgaatttggtatttcttgataagccatttggtcaccgtcctaaatttgatatatcattttacgaattcagtataacgatgtttctcagcattgtctagtgaaatttgacaaaactctattttcaattttgaacgaatatgctatcctgtgaatatgatatatcaaaaaaggagatcaactcatgaaagaaccattatacaaaaaaatttatcacgaattgtatgagcagattcaaagcggtgagttagctccggaaagccgtgtccctactgaaaaggaattgtcagagaaataccaagtgagtcgcatcacctccaagcgagccttaactgaattggaacaaaatcagctgatctatcgtattcaaggaagtggcagttttgttcgtagaccgatccaaccacaatcaaaggggaaagtgctgtttattttacccttcgcgaatgacctttcccttggcaattttacggaaggcatctatccagtcatgcaggaacagggattcgaattgatgctgacacctgttgattatctggagcaaaccacggccgaagctttgacagaagaatttgacggaatgatctactacgctaacaacacgaattcaaattatgatctgcttttcgaactggcttcgcaagggttccctgtcgtcacacttgataaagcactgcatgagttctcattcccagctgttttggcagacaactttgaaggaggacagttagcgactgaacatcttttggcacaaggtcatcaacgcattggctatatttttggtgaacgtcaccatccacagtctgtccgccaacgttatctaggctatgtggatcaattaaaaaagcaacagtcgtcttttcgaacaaaacttgatgatcctcaggcacttttgtcatcagctgttagttatattcaagagaatcagttgactggggctgtctgcgagaatgatcttgtcgccatcgaattgatgcgccaattgaaacaagttggggttcaggttccaaaagagtttgctgtgatcggcttcgatgacattcaagcggctgcattggtggatccacctctcagcactgtaaaacaaaattttgccgagttgggtcgtttggctggtacaaaattagtacagttgattcagtcaactgctgccgacttatctccgctcgccaaagaagatgagtctgcaacagcgaatcagaaagtcgcagtcactttagttgtcagagattcaacaattgaccaaaaacaatgacataaaggagcaaacaaaatgaaagtaacaatgatcgatacgaggcatgggacagataatcaatacagcttttctcacggcaactgtctcccttatacaggggttccgtttggcatgaactattttgcccctcaaacaagcgaccaacgtggaagttggtggttccatcctgaagaccgtacgtttcaaggatttcgactgacccatcagccaagcccttggatgggcgattttagtcaccttacttttttgcctattaatgggaagttatcagaaaatacactatttcatgcccaaagttcctatcgtccagaagaaagtgtcttcaatccagcttgtttacaagtgaaaagccaacgctaccaactcactacaacattgatcccaagcatgtacggaggcattctggctctagatggtgcagtgactgatcctggcttaggaatctctttgcctgggcgctatcagctgcagcaagtcgacgaacagaccgtcaaaggacaggtcatcaattactctggttgtgaagacaatgactttgcttttcacttcatcttgcgttttgaaacagctgttcatgcgattgaaggggaattatcaggagaaaatggctttgtggtgattcgttttgaagaaaaaaatcagcaaacgatccgttttgggacatcctttttaagttctcagcaagcctttctgaatctcagccgtgagttggatcaaacaacaactgactacttgtctaatgcgcagcaatcatgggaaaattacttgaatcgaatagatatcaagcaccacgatccaaaacaagtttcaactttttatcataatttttatcggttgtttttattcccacagactttttatgaacgagatcaatctggtcaaaaaatccattacgatacacttgccaagaccatcaaaccaggaccgctttatacaaacaatggtttctgggatacttacaaaacagtctacccactcttttctctgattgcggtcgagcagctagaagatatgttggaaggatttttgaacagctttaaagaaagcggattcttgccaaaatggttatcacctgatgagcgagggctgatgccaggtacattgatcgatgctgtgatcgctgatgcctgcgtcaaaggaattcgacctgacttgatgccagagctcttaacagctatgaagaaagcagcctccattcagagtccaaatccaaattacggccggcaaggaactgccgattacttgaaatacggctatgttcctagtgagtaccatgaatctgtcaatcatacccttgattattgttacagtgatttttgcattgcccaagtggcaagttctctggctgaccctgaagcaagctactatcagcagcaagcaaaaaactatttagcgatctttgattcagaaacaggctttatgcgagcaaaagacaaagccggtgattttcggacggattttgattcctatcgttggggtcgtgattatgcagaagggagtgcgtggcaaagtagctttgctgtgttccatgattttgctggcctgatcgcagctcatggcggcaaacaatcctttgaacaaaaactggtggatttgtgcaatcaagctccccattatactaccgagggctacggttttgagattcatgaaatgagtgaaatggcggctttggattttggtcagttagctatctcgaatcagcctagtttccactatccttatctctttagttacattggcaaaccagaaatggcacaaccattgattaaacaattgctgacccaatgtttcgatgattctccaaaagggtatcctggagatgaggacaatggcagcatgtccggttggtatgtttttaacgcattaggtttctatcctgtcactcctggtaccggcgaatacgttttggggatgcctttgcttgacgaagcgacactctttttgtcgaatggaaaagaacttaaaatccacagcacgccaaatcagccgcagcagcaatttatcgacaatgtgactctaaatggtaaacaacactctcggttgttctttactcatgatgaactgatcgctggttcgacgatccgctatactctaggcatcgttccccgcagtaagacttggtcagcggaagcttatccttatagtctgtcgcatagtcaagagtcgaatgaagaccataatgaaaatcggtaggtaccttttttaaagaacgagcaataccgaaagaaaaaaggttgcgacataaggatcaaccaaactaaactatctgaatgacagtaattgaattgcgcgaggtatttcccacttatggagataccctgctgaccgccggacaattacaacaaccttcagatagtcagtttgttgaagaacttatgttgcagaccttttttgctggttgctcttttgcagctatcaatcaatgaaccgatagcctaaatcgattagatcaatgattagattcctgtaacgccaaaatcagttcaatggttcgcagcacaccattgtcatcattggagcgggtcacaaaagctgcagcttccttgatttcctcaaaagcatttttcattgcaaagctgtaggtgccagcggccattaattcgctgtcattcaatccatccccaaagaccatcgtttcttggggactcactgccagcaaattctgtaattgggctactgttgtccctttatggacaccttgattagtgatatcgatccacgcagcttctgaagcaacgatgtaggcatctgctgcaaaagaagacagctgcttgacgctatcgatacaacgtaacttaggatcatataccgtcactttcacgaagtcttcttggatctcactataactggtgaccgttttgacaacacgataagaacctcgaacccgggctgcattttcttccgttgtcgtttccttgatataagcggctgttggggtacaggcaatgatcacatggtcatctgctattttttctaatcgttggatcaaacgctgccccaatgcatttgggagtaaggattcaaacacatagcctccttgatgtttgattcgtgtggcactatcccctaatatccagattttcgctgcttgatccccaaacagttcttctacgcgctcgcactgcttgccagtacaagcggcaaaggctatccctctttgttccatcatctggctgactttatcaaaataggtttgatcaaaggccccctggctatttaaaaatgttccatctaaatctgtaatgatcagtttgatcatctcattccacatccttcgccgcgtcgctgccgctctatttatttaactaccttaattaaatatacttatttaactgaaaaccgtcaatcgctttaggaactttctttacattgctgcgcttcatcgctatacttaataaactaggttcactaaaggaggcaataacatgtctgccaataaaaacttgattcgccaccagaatattcaagtcgtcttaaaagaattgtttcaaaaagggacctcttttgcatccgatctggtaaaagagaccggcatcagcatggtgacgataaattctttattaaaagatcttgtttcagagggaatggtaacgaaaggcaagctcgttcaaagagagattggacgcccagctatcgaatattgctttaactataagtactcaaaatcattgttgctcgctttgatagaagtaaatcgtcaattggagttgagaagctaccacatcgatttgaaaggaacgatcttagctgcgcagcaccaagctttttccgagatcacaccgacagcctttcagaatcttgtccgacaatctatcgaagctttcgctgatgtcgaacagatcgctgtgctgttgccaggaaaaatcagtgagggtgtcgtgacttccagctggtatgaaaagtttgatggatgggatcttgaccagttattcaaggagattacgcctattccttgcttttatcaaaatgatgcccatttgctgaccgttggccattgtatcgccaagcagatttctctctcggaaaacatcgtaggtatttataatcccgaaaacagcatgccagggatcacgttgatcttcaatgcttctctgttagaaggccaaaatgcgcttgctggagaagcaaaatacttaccaggctttatcgacaaaggtgctccaaaaagtactcaagaattggtggcccgcttatctgctttagtgcctttttataatgctgcttttgctcctgatcgctttgtttttgccagtacagcagcaatagaagaagacttgctagcggctatcactcacgacccttttattaccaaacagccgaatcatcctgtatatacctttgttcacgacttcgaccaagccatgatcttgggtatgcactggctgcttttccgcaataccccctacgatctatcttgctaaacctttccgttgggcattgggagttgcgccaaaaaaacgaacgagtagatctctcctttttgcaggcgaaaagttacgccaaatcaggggatcaccgttcgttttttgtttacgcaacagtaatttcgatcaaattcccttcaggatcttggatcaccgcttcataataaccatcccctgttgtgcggggaccgctcagcagaggaaagccatctgagacaaaacgttgggcataagcatccacttccgcttggcttttcagagccatcgctaagtgcgtgtaacccagtgtatctgttccaccagggtgaaggtgctgctttgtcgttaattcgatacgactgccagaatcaaaacgcaaaaaataagattgaaacccagtcttggtgttgtgatatttttcagaacgttgggcaccaaaatacgtttcataaaattcggccattttttctagatcacgaacccaaatggcaatgtgttccacaaacattgtatccctcttttcgcttttttatgagaagaatccactttacttgtcctttaatcatgcacatccaaattcttctcttattcattgtatcgaagtttcttctttccagcaattttagtcctatcacagagcaatcctctttcttcttatttcctcatattttaagccattacttgaatggtttttctgaaaccagtcgcaatagttgcagttcctcaaaaatttctctaaagtgaaagaaaataagtcatcgatcaaaaaagattctccagtttgcgaaggaggaatgaaaatgaacatcgcaatcatcggtgctggaccacgaggactgtcactatgtgaaaggttgattgctcaagcaagtatcaatcagcagtctctatctctcacattgattgatccctatccccctggaggcgctatttggcaaacgaatcaaccgcaaagtttgctactcaattctgtgaccagtcaagtcaccctttttactgacgaaacgctagaaactggtggcccgatcaaccccggtcccagtctttacgaatgggcaaaaaaagacggtaggaattttgctaaaaaaaatcagccctcactggtatcagaaattgacaagttggatcctgacggtcattgttctcgcgcattatacgggctgtatcagaaatggttttatcagcaattgattgaaacattgcccccattcatcacattcacgtatttgcaggaaaacgccatcggcctaataccgaaacaaacgcactatttactaaaaacagacaggcactctcttcaatcggaccgagtgattctggcagttgggcatcatcaagtctcgctcactgaagaagaagatcgattaaacgaattcgcccgccggaaaggctttttgtattctccgcctcagaatgcagcggatgtcgattttaataaagttaaaggcggagaacacgtcattctccgaggtctaggattggcgttctttgattatgtcacccgtttgaccactgatcgcggcggtgtctttattggttctgatcgccttcgctacattccttctggcaatgaaccaacaatcattgccggatcaggaagaggtttgccataccacgcacgaggagccaatcagaagcatccaacagaacagattctgcctcgcttcttgacaacggaacgactccgctcttggcaagcgaaagggcaagatcagtccactgagtttttcttttatttgcagaaagaaatggaacttgtttattatcaacgctggctgtctcaagagtctgaagatgatcaagcggcttttactgaacaatttgtccaccaaaatggcgccgccgatgttttgacagacttccaaattcctcaccaaaattggttggactggcgctatatcttcgatccttacaaaagaaaagaaagccaatcggttcgcgactttctgttgacctatcttacttgggatgttacagaagcggccaaaggaaatttaacaagtccgatcagtagtatgtttgaattgttaaaagatttgcgtgatccggttcgctttatgcttgatcagcaattgttttcgccaaaagcattaaaagaaaaattctggcagtctttcgttccattgaacgcctttttatcgattggccccccacttcagcgcattcgtgaattgatcgcactgatcgaagcggatatcgtcacgattcttggtccaaagatgatcgttgaagaaagcggcacctttgtggcttattcagccagctatccccaacaacgatacgccgctaagcaggtattggaagctcggattcaatcgacggatattcgtcgtaccgctaatccattgttaagacaattactagctgatggcattgccagtcctcataagttatacattcctaaggaggctccgttttacacaggtgccattgcgcttgatccggccacaagccagttgcttgatccaaatgatcagattcaagaaggactttactgttttggtatcccaacagaaggcattcactggctaaccgccgccacagcacaaccgggaaccaatgcttttaatttacgacaagcagatcagattgctgcccattgcttgactagttctcttcttggggataggcgctgccttcaataaattgcgattgcaaataaaaaccgatacaataaaagaaaaggctcaaggaggttgaaaaatggcagatgaactacaaaagatcgatgcgttgatcaatgaagtcgagaaagtgattttaggaaaacgtgatgtgatccaattaactgtggcggcattattggcaggtggtcacgttttgtttgaagatattcccggagtagggaaaacgatgctagtcaaatcattggcaaaagccatccaaagcgactataagcgtgttcagtttaccccagatcttttgcccaatgatatcttaggtgtatcgatcttcaattcagaaaaccagcaatttgaatttcgaccgggacctatctttacttctgtgttattagcagatgaaatcaatcgcacaacacctcgtacacaagcagcattattggaagcaatgtctgagaatcacgtgaccatcgataatcaaacctacgcgctaagccctcacttctttgtgttggcgactcaaaacccaatcgaatatgaaggaacctatcctttgccggaagcacaactggatcgttttttgtttcgattacacattggctaccctgcttttcaagatgagcttgctttactgattggacaacgccagcaatccctcaatcaaattcagacaatattgacctcgcaggaagttaccgcattgaaacaaatggtcgatcaagttttcgtggacaatcaagttgctcgctatgcgctgcagctggtccaagctagccgcaaccataatgccattgatttaggcatcagccctcgtggcggcattgcctttttgaaaggggcaaaagcattggctttgaccgaaggaagaacctatgtgacaccgcaagacttgcaacgaattttgccagccgtttttggtcatcgcttattattaaaaggcgggattactgccagccaggaaagtctctctgagatcatgaagcaaatgatccaacgcgttcctgtaccagtgaggcgctgatgatgagcaaacagcggttattgggaaaatatctggtattttttgttacttattttcttttactaagctattgtatcgttttcaataatgaagcaggttggagtctcctcttttttgttactttattggtactagcagacttgttattcattctgccttcccttaataaaatccaagtgactcttgaagaatcgatccaaacacaaataaacaaagaaacgcctttgccgctgcaagttttcaagtatcggccaacgctgttgccaatcccaaagctgtctttgctctttcaaaatcaggaacagacgctcactttttatcggggcgaatccatccgcttagaggtgctgtggcttcctaccgctcgaggagcatataatggactgccattgaccctcacaagtcaggaactttggggattcttcagaaaaaggcggcaaatgaaaatccaacaagaaatcctcattttgccagaatatcgacccgaggtcctatccttgatgacactttttgaaaaaaagccgcgaaaatatacttacggggaatcaaatttcaccattcgaaactaccgtaactatcagcaaggggattcattaaagcatattgactggaagctctccagtaaacagcaagaactgatttatcgagaacacgaaacggaacaacaacaggagttgactttgttgttttggggtgaatctcaccctgcttttgaagacacattggcgatcttcttttcgctccaaaatctcttgcttaaaaagatgccttttcagcaactattgatcggcgaggacctggattctccttatcaaatccatgctggagctttcgcagcgattcagccatttatcacagtcccagaaccattgcccaaaatctcagggcgtcaggtgattatcatcacaccggctgtctcgcaatccttagaagactatctggaatccttgacgccaagcaacatgctgcaagtttatacgtatcatgacctgatccaacgactgtcgaacaaagaggtgtctgaatgaatcctttgatcaaaaaagccataatcggagctctgacttacattgcgatcattttgacggtgctgccgtttttagcagtctaccacttggggcaccaaactacgttgcttctgtacgcctttctgatttgctttgtgagtattttaagtcctcgtcttcgctacagtctgcctttttacatcgtaggttggtttgtcactctttaccgcttttttccttatggtgaaggattttccttcacttggttccaaagatatttttatgatttgcaaacagctctcagcgagattctggctggcaaagtcggttatatcactgaacttgttgcagtgaccattatcgtcaccggcattcttctgtttgctgtgttctcgatctacatccagcatttttatattgtctacggtgcaatgtgtctctatctgctgactgtcgtgatttttaatgatttcaatctaacgtggcatttgttgggggtgtgtttttgcggagttctttgcagcctgatcaaaacccaacagctgaaaacagtacgagaatggtcgttctggctggggctcaccctgctatgttcgttgctgttggttggagcaacactgctgccaagaaccgcgattcgcgatcgcttggtagcagctaccactggtatacgcacacaagcgaatcaacgcggcttttatcagtttatcgaagaacatggtgcacctagcgggtcccgtacaggctttagcgaaaatgatcggcaattaggcggtcccttattagacgatgataccgtgttatttacagcccaacaagatacccgccattattggcgagtagaaagcaaagatttttattctggcaagggttggatcaacacgatacgggaagaagatctgcgaacagtgcctgattccctgcggattgcagatgataattatcaacaagattatcttaaagaagaaacagtccagctttatttgcagaatcagggagattatttgccattaccttatggaagcaatcacctcactattgaagaaggagcctctggttttattgtggatgatgcggttcaacgagtcgatctaatggagccgcaacaacagattgaagtttcactggcttggcagccagcggactatgccgctgaaacattgcaatccttgccgctgcaacagccagatactcctgttgactatacacaattacctgagaaccttcctgcacggattcggcagcttgcgcgctcaatcacagaagatcaaagtaccatcttcgaacaagtcacagccattgaaaatcacttgaaaaattcaattgaattccgttattcaaaaacggatgccgtctatccagcagaagaacaagactatgtcgatcaatttttgtttgaatcaaaagttggctattgtgataatttctcgactgcgatggtggtattattacgaacgctcgatattccggcgcgctgggtcaagggtttttcgccaggagatgctcaaactgaaaatggcctgacaacatttaccgtgagaaaccgcaacgcgcattcgtgggcggaagtctattttgccggttttggctgggtaccgtttgagccgacgccgaactttcaaaatcctgatcgtcccgaattgcaaacaacaactgtctcttctgaagtattacctgaaacgagcagttctagtcgcgagtcttctaccagcagcagtagtgagatcagcagttccacaacaacgacggcaactgttgcgccagcagaagaacaccttttctcacctgaaacatggcaatggatccgttcttttctgcaaggtatcgcatgcttggttttcttgggattactgtatcttttgcgccgctactttttccgaattcgcatctggttgattgctcgctttcgttccgaaccattaccaaccgcctatcctgtcttgatgaaacaagcagcaaaagttcttttccatgctgattcggaacctcttagtgagtacgccagccgattggaagctgtttatcctattttccacgggagttttatccaactgacggcaacctatgaagattatctttacggtgggaaaccaatagacggccaacaacagctgattcttcatgtcgcccagcaaatcagtcaattaaagaaaatcaatcaagtccattaaatgaaagcaagaaaaagaaccgaagacgcagtgctgcatgctgcgccttcggttcttattttgttcatctgattagcgaaaacactctcgcaagtatcatgagttcgtgttgttccctcgagattgtaccgctaaaataatcagttttgtgatttccatcatcaagacagcaccagctgccatagctatgcttaacccaacatggttcattgtaaaggtttctggaatcgcaaagacttcccgaattccaggtagcaatgtcacactataaagcagaccacaaaccacgatcgccagccaaaccattttattcgcaaacaatccagcttgccaagcagtctctgtattggaacgagcaggcaatgtttgtaatgtacggctccagatcaaagttgagaatgccattgcaacacctaactccggcgattgattcatcccgatccattgcgctataatcaccactgccgcaatcaagatcccacgataagtaactgagatcagcgttttaccagaaaagatgccagcatcaggatttctaggttctctttgcatgatagttggttccgctttttccatccctaaagcgatagcaggaagcgaatcattcactaagttgataaacagcaattgcaaggctgtaaatggattgtcccagcccattactaaagcaaacacaatggcgataatcgcgccgaggttaccagcaaaaagataagaaatcgcctttttgatattatcaaacacattgcggccaacttctaccgctcgaataattgaagcaaagttgtcatctgtcaagaccattgctgctgcatcttttgcaacgtccgttccggtccccatcgcaatcccgatatccgcttgcttcaatgctggtgcatcatttacgccatcaccggtcatagcagagattttccctttaccttgccatgctcgcacaatgcggattttattctcaggagagacgcgcgcgtagacagtgattttctccaattgattcgtcagttcttcttccgacagtgcatcaagctctgtaccggtcaatgctaagtcaccttcttgcgcaatcccgatctcctgagcaatggccacagccgtcgttttgtggtcaccagtgatcatcactgttttgatgccagccgatttcgcgtctgccacggcttgcttgacttccttccgagggggatcaatcatcgccatcaaaccaacaaagatcaactcttcttcgagacctaaatgcagttcttcgtcttcagacactgtcagcggacgataagcaaaagccaaaacccgcagcgcgcgtttagagaattcttcattttgatgctgcaactgatgtttgatttcctcagtcagtggaacgatttcgtcattgataagaacctttgtacttcttccgatcacaatatccggtcccccttttgtcaaaaggagttgttccgaatcaatggtatgcaatgtggacatcaatttccgatcggaatcaaaaggcaattcttgtaatcgcggatattgttgacgaatctcacgatacggttgattcaatttttctgtataatcaagaaaggcaatctctgtgggatctcctagtttagctccttcgggactgattgccgcatcatttgcaagcacactgatctcgatcaagcgacgttcaggcaatgtccattcagcaggattctcagaaaattcacccgtctgtccatttggcaaataaaaatcaacgaccgtcattttattttgggtcaatgttcctgttttatctgtacaaacaatactagtagaacctagtgtttcaactgccggcaacttacgaatgatcgcatgttgacgagccatttgtttggtaccgatcgataaaacaatcgtaacgatcgattggagtgcttcaggaatagcagccaccgcaacagcgactgcaaacataaaagcgttgactagatcggcggtcatatcgccagacccatcacctaaaaatagccgagcaacttggacacctaaaataatcaaggaaagaacgaggatcgccaagctcaattttttgctgaagcgatccagcccgcgttgtaatggcgtcttgtgttccactgtgttttctaataaaccagcgacttgcccgatttctgtcacatttcctgtggcagtcacaatgaaacggccacggccgtaagtcacgatcgttccactaaagaccatgttatcgcggtctccaataggcgctgtgcggtcaataaccccaagttctttttcagcaggtgtcgattcgccggtcagcattccttcatcgactttcaatgccccttcttcaatcagacggccatcagcaggtacatagtcccctgcttctagaataacgatatcacccactaccaattcttttgccggtaccgtttgttcctttccatctcggataacatttgcattgggtgccgagaggcttttcaatgcatctaacgatccttctgcttttttcgtttggatgacactaacaaccgaattcagtagcaaaacagcaaaaatgacaatcgattcaacatgggcgcccatgatcatctgaacgatagccacgatcagcaaaacgatcaccatcgcatctttgaaggtttctaaaaagagtatcaaacttgattttttgggagcttctttcagctgattcaagccattttctaagcgctttgccgcttcttgctgggacaatccagatggactactgtttacctcgttcataacctctgtgatttctttttgatacatttcttttgccaatgatttctctccttcatagttgctatcccttgcatgagtccttttttagaaaaaaagagacctaagacaagtggatgcttgtcttaggtctcaccatttcatataataccagaaaactgtcgccagtttacttactgttgatattatcgcagccgaagccactggttactcccctaagggtttatcagaatgtagaatcatcataacgaaattttttgaagatagcaacctttatgcacaaatttgtcttttctcagatatatttttttgaaaaaagcttcttttttctgttacactaatctacagcgtaacaagcgtgacagaggaggaacaataatggaaaccattgatttttttacaagtcacacatcggttagagacttccaaaaaaagtctttatcagcagaaatgaagcaacaacttgtcaaagtagcacaaagcggttcaagttcaaatttcgttcaagcctattcaatcatcgagatcaaagatcctaaaagattggcagaaatcgagaaaatcgccggtgctccccactatatcacacagacgggtgtcttttatctgttcgtagcagatttatataaacaccatcaattgttgcagcaagcaaatttgcctagtgctggactatcgaatatggaggccctcttggtttcggttgtagatgccaccatcgccgctcaaaatatggcagcctttgcagaaacccaaggtctgggaatctgttacattggcggaatccggaatgacttgttccgtatcgctgaactcacggagctgcccccgtatacactgccattgtttgggttgactatcggttatcccgcaacgaaaaatgagccgaaagttcgcttaccgcaatccgctgtgttaagcgtcgaccactatcagccactgaccgaagacctcgttgctcgctacaatgaaactaccgcggactactatgcccatcggagaagcaatcaacaaaaaacggattggcaaaccaaaatgactggctttttccaagaacctcgccgtccggacgtagaaaaatttttgaaaatgcaaggctttttgacacagtaagtacgaaaacaagcagctgctccttgttaccggtcgctagactatctccatcaaaaaaacacctcatgaagaagttcttcatgaggtgtttcgagttgttttattttgccaaacggtagatggcatctgcataaatcactgccgcgttgaatagatcatccaagctcataaattcgtttgcttggtgcatcgtatctgtgtagcctgggaacatcgccccatatgcgacaccacgttttaataaacggccataagtgccaccgccaatgatttgttcatagcctttttggccagtatgttcttcataaacttcaagcaatgttttcaccaatggatcatcaattggcacatagtgaggctccatgttgcgctcgttccgagtcactgttgcgccttccatgccaacggttttttcaatgccgatttccagaccttctgcagttaccccttgagggtaacggaaattcaaggcaataaagttgtctgcttgaacacctgattgattagctttaaaagcaaacaaaccagcattcatggttagtttacccattttttcatcttcatgcgccacgcctaatttttcaccataaaaatcttcatggacataagctgccgccgtatggataaattgtcttgcgccgccgccaaaggcaaagttgtctaaaaagactgccaagaaagttcccgcattgatcccagactgaggacttgcaccatgggcgcctttaccgactagttcaatggtaacttcttcattttctgtttcgatggtgccagtcactggttgaccttcgacataatcaaaaaaagctttttccatttctaatgcagcttctgtagacggggcagtcaattttgcaaccgcagttcctggtaccatgttttcccgcaaaccagcagtgaattgttgcagttgataagcaccttcgttatttccttggaaatgaagccctaatgttacattccctttttcgccattgatgattgggaattccgcatcgggagagaaaccaaaatcaggtttttcttcatgctcgaaatagtaatccatatcaccccagccgctttcttcatcagatcctacgacaaagcggatttttttagataatggcaagcctaactctttaatgatcttcattccgtaataagcagccattgaaggacctttatcatcggaagatccgcgagcataaattttattgtctttgatcacaggatcgtagggatctgtcgcccaaccgtcaccagcagggacaacatccatgtggccgaagatccctaatgtttcgtctccttcaccaaattcgatatgtccagcatagttatcgacatttttcacagcgaaaccatcacgttccccataagccaacatgtgcagcaaggcatcacgaggtccaggtccaaacggagcatctgccgttaccttgtcatcttctcgttcactttttactttcaaaagatcaatcaagtcatttagcaaatcgtctttacgcgcttcgacttcttttttccaatcgattgtcatacgattccctccaattcttttctcgccttttatgataacactcttagctgaaaaaaggaaaaaaaattgtgtattttcagacgatatctttcataaaacgagtataataaaagcaataggtttattctagaaaatgagcccagtgaaagaagcagaaaaggagtcattgtatgaagcaactggagcaaactattttagcagcagtgattcgcaaacgccccgtcgaaagtcacaaagggacctttggccgtgccgtagtgattggcggtaaccagcagtacggaggcgcaatcttgatggcggcacaagccagtgtttatggcggaactggactaaccacggtgatctccgatcctgtcaatcgtacggcgctacatgcgcgactgccagaagcgatgttcgtctcttgggaccagactgagcttatcagcacggtcactgaatctgcggatgtcctattgattggcccaggcatgggggaaggcaaaaccagtttcaatctgttgcaaacagtcgtcgctgaacaaaaaagccatcaatggctagttgttgatgggtcagcgatcaatttagctgcgaaatacccattgacttttccttaccccagtcacgtcgtatttacccctcatcaaatggagtggcaacgattaagcggcattgagatcagtgagcaaacaccggagaaaaacacagccttccaaaaaaaattagccagtatcgtggtcttaaaaagccatcgcacccagatttatggcacagaaatcgtcgaaaacccattaggaacgccagctatggccactggcggcaccggggataccttagccgggatcattaccagttttttggcacaatttgatcgaaccgaagaaacggtccacgcagcggtttatctccacagtttgattggcgaacatttagctaccgagaactatgttgtcttgccgacacagatcagtgaagcattgcctaaatttatgaaggaccattcgttgggctgattggcgtaacgaatggtccttttttcttagtgtacttcagaggggtgatatacgatcctgacttcatagggtgccaacgtgattgctcctactagatgttcattggtttccagatcggttactggctgcttcaatactagttgctgttcttcctctgaaaaattcataataaatgaatagtctcgttgcgtcccaactcgcgtttgaatcgacacctcaggaagtgcttcagcaatcgctgttcttctcaatcccaacttttcaatcaacttttgataaaaagcagctaagaaatcactgttcgttcgggcagccaaataatacgaagcccctgcaccgaatggcttcttcgtaaccgcaggcgtgccttgatagaaatctgtctgataatggcttaaaacttctgcatccaacacgtcaatgattgctgaatagtctttggtgacaaatcgctgatcttgaaaatcaatctgattgtgttcgtcttctaaaagtgtttcaagctctaatacctcaatgccaaagagcgcctttaatggttgaggcaatccgccaatataaagcaaatctgtttcattgaccattcctgtgaaatagctggatactagtattccacccttttcaacatagctcgttaattttagcatcgttttttctgtcatcatatatagcattggcgcaatgactaattgataatcagaaaaatcctgctcaggagtcagaatatcaaccggaatgtcttgttcccagaaaacctgataatgctcttgcaacgtttggggataacgtctcgtaggacggccgaatcctcccccgcgcttcaacgcccaattgctttcccagtcaaagagaatcgccacttctttcttgcgagtggttcctttgatttcactgattttttcgagacgagcgccatattcagcaacttctttaaacactcgattgtttgtggaatcatcatgactgacaacggcgccatgaaatttctccgaattgccacgagattggcgccactggaaatacaaggtactatctgacccatgagctaactgctgcatactacttaaaatatggaccccggggcgcttcgatttgtcgtattgttgccaattgacataacttggggtacattccataactaaaaagggttgtttcttcaaagaccaatactgatcatggacataggcagacttcatagcggttgtagcgattgcttcaaagcgattgttccaatcgggataactatcccaactaaccacatccacatactgagaaaacttgccatagtcgattccttccagaggaatgaaatcctgtgtggcatgaccttccgccataaaattcgtcgttactgggatatcaggggttcgttcccgaatagggacaatctcattcaaataaaaatcaatggtctgatcagtgacgaatcgtttccaatccagatccatcccatgaactttatgttctcctaaaggtgatggtggcaagacttgttcccaatcggaatagcgattgccccagaaactcatccaccacgcatgattcaatgcttctaggtttttgtactttttctttaaccagtcacgccaattttcttggcagtattcgcaaaaacattcacccgaatactcattggacatgtgccacatggctagtgccggatggtcgccatagcgttcagctaattttgtgttgatctgccgcactttttcgcgataaattggtgaagaatagcaatgattatggcgaaagccatgggtatgtttttgtccatacgcattggtgcgattgacttccggatatttctgactcaaccactggggacgaccaccgctgggggtagccaaaatgacattgccccccatagcatggatcgcatcaaactgttcatcaagccagtcaaactgatagaccccttctgttggctccaaagcgctccaagcaaacatcccaagtgtgaccgtattgacgtgggctttttgcatatacgccaaatccttctttaggatttccggataatcaagccactgatcgggattatagtccccaccatgcaggaaccgctgatcaaagaaataattcgtcatctttttactcctttttgattgctttgatttgataaacaaatgactggaaatctcctgttacttgcgccgtttggtgattgacagcattgaataagtacggtttgcgcagtccaatttgcttcagaaccttgccagacaactgctcattctccagcagatagcttcgatccagatcaatgaacggtaccggtataaaagcttccgctgcaggatttgcttcagcaagaatccgaaaataggcaatcagtgcttcctcttgatgagagactccccatacaacttcatttttttggctcaaatcggtcatccgatagaaggcgccataagtcagaagttgtcgatgagctttatagaaaatgatttgttctttgattgcttgtttttcagctgctgataaactgaaaagatccagctcgtagcctaatgggccaaacatagccaccgattgccgaaatgccagtgacgtattgcgccccacttgatgattgggacaagcggagacatgattgctgaatgaagacatcggatagccaagtaatgtgccggtttgaatttgtagtcgttccacggcatcgctgtcgtcactcggccaaatctgaggactgtaaaacaagatccctaaatcataacgaccgccgccgccagcacagccttcgatcaaaatctccggaaattctgttaatattttctgataaagggcatagacccctaaaatatagcgatgaaagaattctgtttggggaatcccttcatctgctaaataaggtgaataagcttctgtgatattccgattcatgtcccacttgatataatcaagatccgtttcgacgatgacttttttgatcgcagcaaagattgcctccacgactgccggattggcaaaatctaagacatactggccgcgccccacagagatgcgttcataaggatgtcggaccacccaatcgggatgtttttgataaaactggctgtcaggagagaccatttccggttcaaaccaaacgcctaactgcaaccctagatcgtggatttgttttgcaaaatgaccgatgccattaggaaatttcgctggatctggcacccaatcccctaaagaactgcgatcgttgtctcttttaccaaaccagccatcatctaagacgaagcattccattcctaatgcctgactttctgctgctaatgctactaatttctcttggtcaaaatcaaaataagttgcttcccaattattgaagacaatcggccgcggccgtttttgccaataaggggcaatcacgtgcttttcaataaacgcagcagactcttgccctaacccattcaacccttcatcggtaaatgtcaatatacattctggggcttcaaagactgcatcttgctgcaatgtccaagaaaactgttcgggatgaatccccagcatcaagcgcacattgtcccactcatccatctcgacttgagcgagaaaattccctgaataaatcagatttgctccatagacacgtccctgatcattggtggcattggcagccttcagtgccacgaagggattgtgctgatgcccagaggccccttttaaagaccccactcgaaaggttccttgcgtcaatggtgtggctttgatttggcgttcctttagccaagcaccagaaagatgaacaaattcaaattgctgatttcttaattccagtaccccgctcatcaacgaagaaagttgttttttctcagcgccaagattggtgatccgctgattgcgcgcaatcgtgcctaaaccagcaaaaatagtgtaggtgatttccattttcaattgccgctgctcatcgatcaacattattcgcaggctttggctttctgttttttcggcaaaactcgccggtttggccagctctcgttcctttcctgcgaaagtttcgacttctgcgactttaaaatccacatacaaaggcacgtcttctgcaaaaatagtaacggctccttctcgaaagtcagaagaaccataggttggcaactcttgaaagcgatctgctaacgtaaacaggccatcattttcaaaaaatttgaccgtgccggcagatttattttcttttttggttaaatagtccatgtcattggcactcaaatgccccaaagatggaccaaagtacagatgacctaattgtcgatttggtaaaacatgcatcacataactaatcttttcattgtataaatgaaaaatcgtatcggttattatctcaatcatttttttcctctaatttcaactttattctcgtctatttcattatatttctggcatgcagtttccaaatactgcatgcgttttttgacccctttgttaaaaaagaacttatagaataatgctgccagcatgaaactatacgtattgcgggaacgatcaaaagaattctgttccgaatacgtaacctcaatcttttctgctcccctaggaacaaagcgatacctttgacagatttttccttgttcatagcctgttatcaaagcaacctcatcttgcgcgatttttttgactttcagcaccgctggcaccagcgtggccgctgattttgtgcgaatcatcaaatcaatttgactgttctcgccgaaaggttcttctgctccttttgagcgaaagaatgccgcttgttgtgcgatcatcacttgatagaatcgttccggcgttgtacgcatctgataagtataggtcaatgtatctgttcacatcttcgatcctccattttttcagttgccatgctgacagaacagaatactaagcttagctttctttgattctttcgtcgatggcagggccagtttgtgcgagcgcttctttggctagctcttctttttcttctttcaaatagccacgatccatcacgattaggaatggcacccaaatcaatgtcatcacagcaacagttaccaattgtagaatggcacctgctacagagccagttcccagccagccagataagaagaccggtgtcgtccagactaccgttgctccgattgggcgaggcacaagaccagcagcgattgcaaaataagaaatcgtcgtactagcaagcggggccaaaatccacggaacaaaagcaatcgggttcaatacgatcggcaacccgaatgtcattggctctgacacattgaaaacagatggtgcaatgactgtcttcatcagcttcttcatccgaatcgaacgagcaataaaaaatgccatcgtaatcgagatccctaattgcattccttggtttacaaaaacgcccatgaaggttgtattgatgatatgaggcagttgttctgcacctgctttataggcttcgtagttttcaatcgccaatgcattcatgatcggatcaatcacggcgttaacaaccagtgtgccatggatcccaaaccaccagaagaattgggtgaataaaacggcaatcaagactgcaggcaacgtgccccccaagcccattaatggtttctgtaagatttcgtagacaaagtcgaccgcattgccccatgacgtgaatgtaaacaagtaacggatcaaattaaataaaaacaatggcgcagcacctggaatgatagcaaggaaagactcagcgatcatcggcggaaccgattcaggcattttgatcgttaacccagaagcactgatcttgcaataaatttgtgtagcgataatcgctgtgatgatcccaacgaacatcccttccgcacctaattttgaaaggggaatcactgttcccaggtcatcggaagaaccgtagggcaaaagcattaagaaagaggacaatgagattgctccggcaaaaagttttggctggccatattttcctgccaattgatagccgatcccgaaaacaacaaaaatcgctgtgatactcatggttgcgttcccgataggaccaaagaaatcattcaaaaaggtcatcagtcctgcgggcagtttctcagataagccaaaggtagcgggtaaattttgaataatgatcatgattgaagcaaacattgtcgcgggaaaagcaaccataaagccatcacgcagactcaataaatacttattattggcaatgatttgggcaaaaggaaccatcttctctgctaatttatcaataaatttcataactaatctcctttaatttgtctgtaaacgtttactacaatcagtataattgtttagttaatgtttacacaactctaaaataaaaaaaagatcatttttcatgatctttttttatcggcaatcgattctcttaatatcaattcacttttacaaatcactcggactggcattgttcgaacgcccaataatttgtttttcgccagctctacactcatttgacccatttcttccgctttcattttgactgaagaaagcgctggtgtcataaactgggccatttgaatatcatcaaaactaaccactgatatatcttctgggatcttcaatccgtgttcatttaatgctttatagacccccactgccatgggatcactagcaacgatgatggctgtcggccgtggggtcatctcggcgatttttctgccaaaagctaatccagtctctggagaccattttccttgaaaaacatgactgtattcttccagcttgttcatcagcatccaatttttgtaattctctgcacgaatttcttgttcatcataaacgacttctcctgtgatcgttactcgactggaaacaccaccaataaatgctatgttctcatgtccttttgcttttaagatatccaaaatttgatgggtctttcgagcaaaatcagtttgtatgcaatcataggcgtcgttttcactataattatctaccaaaataatatgttgattgtaccggctgatttcttgcaatgcctcttgcgtcatttccccaatgatgatgacagcaccatactttgccagttgagtcagatctttgtcttggtctcgcatcgagaagacacgaaccgtttttaaacgccatttggctgcctctttctctattccgttacgaatcatcataaaataaggatcattacgctccgattcactgttatgccgtgtaatgattgctatcgtatttttatcgccagcttctcgcgaactcgaaaagctcttgtcttttgaataattcagctggttggcgatctcgatcacccgtttgcgggtattttcgttgatactaaatgtttcatcattgtttaagattcgcgacacacttgcgacggaaacccctgccaattttgcaatatccctcatacttgccattctgccaccccgttgtttactgtttactaaatctctttttaagaatagagagaaacagcgattttgtcaatccctacttgttacgcaagaaaacaggttaggttatcgcgtgcagaaaaatagttgcttcgtgtatgataaaagtagaaataggagggattcagatgaatatcacaacaacacttatgcagcaattggaaaaagacgaaggggaaatgattgcgattcggcggcacttacatcaacacccagagctttcatttcaggaaaaagcaaccgccgcttatatcaaagcctactatgaaaaactagactgccaaatcacagaatgtggcgacggctatggcctgatcgttgatatcatcggtgagcaatgtggaaaacagctggctttacgggccgactttgatgctctggctgtagaagaagacaatcagctgccttttcgatctcaggttcctggtgtgatgcatgcttgtggtcatgatgggcatacggcctatttaatggttttggctaagaatttgattaccttaaaagaccagttaaaaggaagcatccgcatcatccaccaaccagctgaagaagtatctcctggcggtgccaaaggcatgattgccgacggttgtttaacagatattgatcatgtacttggcgtccatgtgatgtcttcaatggaaacaggcaagattggctaccactctggcgaaacccaaactggacgggcaaatttcactttgaccattcgtggcaaaggtggtcatgcttccatgccgcaactagcaaatgatgccatcgtagcaggcagttatttcgttactcaactacagacgatcgtttctcgtcggatcgatccttttgacacagcaagtctaacgattggttcttttgacgggagtggttcctttaatgcaatcaaagagactgtgaccctaaagggagatgttcgtgtgatgaaagaaaccacacgtcaaacgattcaccaacagatccagcgaatggcagagggtctagcacaaacttttgcggttgaaaccagtcttgaatatgatgacaattatccggttctttataatgatccagcttttacaatacaagtgattgattccctcaaagaagctcacttacctgaagtgaaggagatctttgattgcggtcctcaagatccctctgaagacttcgcctactatgcacaagaacgacctagtcttttcttttatatcggttgtatgacagaagatcatctcaatcatcctcaccacagtcctgatttcatgatgaatgaagactgtctcttgattgcagccaaagcggtcggtaccgctacaattgcttatttaatggattagctcctaatcaatgcagttaaaaagagtagtcataagttcccaaaacggcggtccccatcatgcagggtatcgtatcgttttgtctcaacttatgtctactctttttaatgagagatctggattgaagtaatcgaagcaggacagataattaactgaatcaaacaacaaccactcattcccaccaaaaataagtacgccggaccgaagaagccaaaaaacaacaatagcgtaatcgtccaaaaaagatggagcaacactcgtttaggtgagcgaccggcttgataaaaagcataaaagaagctgacttgctgcttcttttcgcccattaaaagcgtctgatagaaaaaaatcaagctacagatcatgaagatcacgatcagcatcgtggccatgacttgaaaaagcggttgtggaaatcgactaagaatggaatgatcaatcaaaagaaaaagactataaaagctgaatacaatatctttctttttattcagttgccacagctcagaaaatttcgtaaagaaaatcgtcgtcgttttctcttgttctgccctctcttgagtgtctttgatctgcttaatcgccgcaatcatacttcttgtcgctgttgccactgtaaaaaaaggcaatgagcaaaccaaccacaaaaattgtagaagaatcaatttgggcatccaattgatccaagtgatcagaccattgaataaacgctgcggctctatctttctcatcctttggttcctcccgtcagatccattccctcaataaagtagcgttgtgcaaaaaagaataataggatcgttggtaataagaccagtgttgcacccgccatcaaatagttccactgtgtcgttgattgattttggaaaacttgcaaaccgatttggagtgtatatttttcttgattttgaatatacagcaatggtcctaagaagtcattccaagcaccattgaatgaattgatggcaatcgtgatcagtgcaggtttggttaaaggaatcatcagatggctccagatatatagatgattggcgccatccatttttgccgcttcaatcagttcattattgatcgataagtaaaattgccgcatcagaaagatattgaaggcattcccaaaaaatgagggaatgatcagcggcagatacgtccctacccagccgattttagaaaacagcacgtattgtggaatcatcgtcacaaatcctggaatcatcattgttgaaaggaccagagaaaaaatcaggtttttccctggaaaatccaacttggcaaatccataagcgataaatgagtttgaaagcacgttgccgaacacaactaacaccgtgataaacaaggtgttctttgcatattgccaaaaaggaaacgcattgatcgtatcaagataatttgagaaattgatttcttctggaaaaaacgttggtggataacggacgatctcttccattggctttaatgaggtgaataccatccacagcaacggaatgatcagaacgatgccaatcacagtcatcactaaataactcgttaactttttgatccgctgctgttgagaattgctctttattttgtacatctgcatacagtcagccctcctgagatagtgtactttgttgaagccatcagttttgtcctcctgcatagtggacccaacgaggagctaatttcagattgataaatgttaaaactaatacgattaagaaaaggatcatcgacatcgccattgcataccccatatcaaaagctacaaacgctttgttccacatatggagattatagaacaagagcgaattggcaggtccaccagtgccgtttttcgtcataacataggcttcttggaagatttggaaagaaccgattgtcgacgtaatgacatcataaaaaataattggtgtaatcaatggaatcgtaatatgtttaaacttagcccacataccagcaccatcgatctctgctgattcataaagcgttccggggatgttctgcaatgtcgccaagtacagcagcatcgcccccccagagctccaaattttcattaggatcaatgccggtttggtccattcaggatcaaacagccaggccggacctttgatgttgaaccagcttaaaaaagtattaatcaaaccagcggaaggcgacagcagctgcatccataacacatatactgccacaccggataaaatcgctggcaaataaaaagtcgtccgaaaaaagctgattcctctaatcttttgattcaataatgtagctagaaagacactgaataaggtcgtcagtgggacattaaagagtacaaaataaattgtattataaagtgatttccaaaaaagtgcatcttgcgtaaacattcgtttgaagtttccaaaaccaataaaattcatttttgacgttagattgtaatccgtaaagctgccgataaacgagaataacatagggcccagcatgaacaccatgaaaccaatcaaaaacggcgctacaaacaaatatccccagagggcatcttgtcttttgcttctcgatcgtttctttttcataattcccctcctttagtaaagtgttttctgccatcttttttcagcaaaatagcaaggatgcaatgagaacagtaacgatagaaaagggaatgcggctagccacaactccctatctcaatctattatttattttgttctacaagatcttccactgctttttgagcatctgctaatccttctgctggttttttattccctagcagaatttgatcaatttgttcattgactaaactgctgaaatctggtgcatccaatggtaccggagtgattactgtattagcaaaattctcatctgccatttgatagatcatttgacctttttcatctaaatgatcatttttgacaagattttcatttgctgttcggttagccataatatcaaagctcttttcaccaaatttttcttgaacttctggggttgaaagatactcgataaacttgtaggacgcttcgggatttttggctccttgaggaacttctaagacaaagccgccaccccatgaccagtgaccagaacctttttctttttctggaatctggatgacgccaaaatcaaagtcatctggcgcattttccatcaagctagagtaataattgatattctgtgcccgcatggccaccaaaccagaaataaatggatctgctacaccggagccaaactcagcttctaaacgattgatcgtatcttgcccataataatcttgccaatcaagaatccaatccagagcctccactttattttctgtgtcaatcgaaaccttttcatctttgtcaaaccaactaacaccgttatcagcgttcaatgcccaaacatccgcgccaaggttccacaaaggatagaatccgatacgctcaaaatcatcgccttttttgacatctaatttgtgtgcaacagtttcaagttcgtcccatgtttggggtaactgatcttcactgatccctgcttctttgaaaatttgtttgttataaaaaatcacttgggtatcggtattgaaaggaattgcataagggtctccttcatattctaccgtatcccataattgaggataaaattcatcagacatgccatctttaacgtactcgctcaagttcgttgcttgctgtgcttctgcacgctgcgcgactgaattgatgtcttgaacaataacatccggtggatttcctgcagtgattgccgagagagacttcgtccaaatatctccccaaggctggtaactatatttcacttcgatttcatcttgtgactgattaaaatcgtcaatgatctcttcgatgacttcttggcgagcccccgatccccaaaaagaccaaaaatctaatgttattttcccatcacttgtctgttttcccgatgcgtcagtatttttgtcttccgaattactgccgcaagccgctgtcaccaatgcggtcgaaaacagcaacagccctattgatagtgcctttttcatcttttatccctgctttcatttttatcattattttataatgttgtaattttaaaatatcatgactcttagtaatgagcaaacaataagcattgtttttttatcaaaaaaaataacgaatttcatagccggagattttttgtagcgttttctttgaaatcttatttattttcaggcatgatagttttagaggatttttcttaagctattgttctcttttttcatttttttatcacttaagaaagaacaatgaaaataaaactacgttttatgaaaaaaagaaagaaggaatcgtcaatgttagttgttattgatatgcagaatcagattcgtgatgaaaatagtcaatcatttatttctgacagcctgctttgatcacgcgaatcgcaaaacggcttcaacaagctcgtgcagaaggtgaatatatcctttttacaagagatatcccgattgattgtaaagatactcctgatgaagaacaagaagcgttacagatcgttcctgaactgcaaccgttaccgaatgaaaaagtaataaaaaaatattactttagtatcccacctgaagttctcttggaaatcaaggagcaacttttcaatgataaaaatgaacaaaaacatatcgaagtgaccggagtagaaaccaacatctgcgtgttgtctaatacgatcgagattcagagtgcttttccagaagccgattttctcattaatcaacagctagtttcaggtagaaaccatgagtcttctggattgaaaatcttacaagacttcaatgtcgaagtggttgatcggacagataactaaaaaagaaacgccaaccacaggcgtttcttttttagttattatgcagtaattcttgcggtatctcgatgcggacatcatttgttgtctgacatgcaggacagacaaaggtgccttcgatcgcatcttttactttaccataatcataatgaatagcgatttcatctgagtgtaactcgttttcttctagaggcggaactgttttcagcttcccatctacatcttcttgcagatgaacaatcaatttgccatcataattttccttgcaattcacacaagatgcttttccacgaatcgtaatatccatgtttttctcctcttttctacttttatgtgagtcctcattggggatacgcttcgatggatgagcccatcgatcctgttttcgatccacctttatagtgtcacgcttgtttagttaaatcaactattctgttttcaactgtcttgccgatcgcaaaaaattcggctggtaaaccttgagcgtttcttttgtcaaaagcattttttcccggcacaattattaagaacacgaattttttgtcatcccaaaagaagaaatggcagtcaatcacacgaccaggaacctttcccgtcacatctcataaaaggaggaacaagtatgcgtgcagtaacatggcaaggaaaagaaaaaatggaagttcgaaatgtgagtgatccgacgatcattgaaccaacagatgcgattattcgagttacagcaacagcgatctgcggctctgatcttcatttgtatcatcacggtggtgcagtactagaagaagggtacgttgttggtcatgaaccaatggggatcgttgaagaagtcggcagtcaagttcaaaaattgaagaaaggggaccgtgttgtcatcccttttaatattggctgtggacattgtcatttttgtcaaaatgagatggagagccaatgtgataactcttctgatcaactttatggtggcctctttggctttggtaagctgaatggcaatcattggggtggacaagcagaattcttacgggttccctttgctgatttcacttcgtttgtcgttccagataccgcgatcccggatgaaaaagtgctttttctatcagacattttgccaactgcctactggagtgtccaaaatgcgggtgtcaaacaaggcgataccgtcattattcttggctcaggacctgtaggactttttgcccaaaagttcgccgttatggctggtgcgaaacgagtgattgcggtcgatccagttgcccatcgactggaaaaggcgcaaagctacaatcaggtagagaccttccaattggatgaccttgcgacaagcgctgatgatttgtatgaattaacaaaaggcggcgccgatgtcatcatcgattgcgtcggtatggatggtttagaacccgtcaaagaaaaagccaaaaatttggtcagcttgcaaagtggtacgatttcaccgatccaaatggcggcgaaagcggtcaaaaaatttggtaccgtgcaaattactggtgtctatatgactccagcatcgtcctaccctttacaagagtttttcatgcgcaatgtggcagtgaaacatggacaagcacccgttatccacttaatgccaaaaatttatgaaatgatccaaaaagaggagatcgacccaacaccgatcatcactcataccatgcctttagaagaagccgctgcggcttatgacatttttgacaaaaaagaagataacaacatcaaagtggtattaaagccaaattaacgcaaagaaaggatgatcgccctcagtgccaaaaatcaaacgaaatgaacatcagatcgaacttggtaaagacgaagacgtcattattaaaggacgccgttttcatgtctatttcaaaaaccggtatctgctgatttccctaacgaatgatattttgactggtttattttatattttcggaagtatcgtgtccttgacagatctgcctgcgatctatggaactatcgcctatctgataggagcaatcttcttaacgatccgaccattgttgaagatcgtccgtcatgtatttatttacaatgaacggaaacaaaatggagagaaagaaaagaatatcgaagtatccgatgatggtgaataaacagtgacgattttcttcaagcagtatttttcccaaaacaaaacacatgctatatactataaatatgcacaaagaaaggagaattctaaaatgaaagtattagacagtatagctttagcgctacttatcgttggcggcctaaactggttattggttggactatttgaatttgacttggttgcaacaattgcgggcggatcaactacattattcgctaaaatcatttacgtaattgtcggtatctgcgcgatttattgcttgaagttctttgttggtattgctcgtcaagacaacgtgaaccgataatcattgataaataaaaagcaagaaacgaatgatctgatccatagttgctctactttctatggatcagatctttttgtttgcattgccttttgtctctttttttatttgttgtataattagtgtcaacagcgaattaaaaaatttagataaatagattttggctggactaggaatagcagctcattcacaatgaaccgacaaaggaagtgacccatgactgataaaaaacgtaactccaagcttctcccttctctgcttttttatttcatcctcctgctcatcattgcaggaatcttagggatcgttgtactgacgaacatcaatattgccgaaaactggtttggactggatgagtacacagttgtagaaactcgcgaccaagtgatcggctatcttccgctactctggtacttcgttatagcactaatgatagtcttggcattattttttggtatcagaaaaagaaaaagggctttgttctattggatcggcacattggtcattctccctagcatcttgttagcatttggtgctttaacaaccttgctacccttcgaccgaaatttttttagagaagaagcctctgcttccgcgatcatggctgaattaaccgacaaaaaagcgctgaaagatcaagaggttcagctcatcagttatagctatcacattcggaacattcctttgaaaagcggcgtctatgcagtcgcgcgaatcatcaaccctaccactaaactacaagatgaatactggtattattcgacaaatcttttacaaaaatggcagaaagacagtgatacgatcgagttacctattcaagagaccattgcttataatgaaatcgattggggcgttattcccaaggttatcaaagaaacggaaaaacgggttgcgaaattagaccattattatcccggagttagtatcgtgatcttaaatggttctcaaggcaaatggacttggacggtcggtgtcgatgatattcggggacatactgcactgaatctggtttatgatctttcaggaaattatctttctcaatgggattaatcggtcaatacaggccctacttccatcatttattaagacagcaattaaacaaaaaactatctaagcgatcactgattgttcctatcaaaggacgacttgctaaaaaaagcaatgagacaatcaagattttttagatagtttttttattattattcacagatacgcctagcttttggcacagcgaaagcctaaattattggccgcagacatcccggagtttccattgcgggctgcgatccgataacgtttgcagtaagattcatgacacaagaacgaccctccccgtgtcgcatacatggcatcatccacctgctgaaatcgttgctcaaaaaaatggctgtcccatgaacgaaattgttccaatggtatccttgcgggattgctgcaccattcccacacattgccaatgacttgataaagtccatagccattcggctcataaaaccgagcaggtgcagtactcgcaaagccgtctgccttcgtatttgctttgggaaacgcgccttgccagatgttgcagtgatagtcttctccagctaaaaaatctgtcccccatggatataagtcattctctgtaccacctttcgcggcaatctcccattcagcttctgttggcagccgcttatctgcccagcggcaaaatgccaacgcatcatttcgcgagacttggacgactggatgatccatccgttgctcaatcgatgagtccggaccttcaggatgtcgccagtctgctctcgcaaccgcataccaccaactcatattggggatcagttggctcctctgtttcgtcttttcggaaagaaaataatgaaagacaaacgaccagccaaactgttctgcttccgtcacatagcctgttgccgcaataaatgcttcaaacatctgattggtaacagtcgtttcatcgatttcaaaagaggccatctcaacttggatcttgggaccttcttggtcctcttcaaagccagcttttgtatccgtgccaattcgatacgttccagcaggaatcttgatcatcccatctgccttctttctataataattgatagccgttataaagattgatggttagcaccaagaggatgactgtctggaagaccagcgtcactttttgtggtgagaggacagtgctgacttttgcccctaacaaaccgccaacaatcgcggctggaatcacaaaccacaaaatctttaagtcatagaggccaaatccagtggtcccagcaatcgtcacgattttcgccaattgagagaaaaaaatcgtacaaatcgaatagactgtcgcttctttgattggcaaagcaaacatcagcatcagcaaagaaacattgatcggtccgccgccgattcctagaagactggctagaaaaccaaggactaaaccacagaagcaataccagaagttatttttcagttggaatccgggccagtcatatttggtataaaagaaagcaaacaacaaggtcacgacggtcaaaaagatctgcaccatctgtacatggtcttcattctggaaaaacagcaacagctgatcaaaagcgacattgcccaagacaccgcctaagatggcgcctcctgaaacccaaaggacgatttgccaattgatcttatgtccgctagccaactgtcttgcggtagaaaccagcgacatagtaaagactgctacggcagaataaaacgagatggccgcaacagaatgggcgccgataaaatcaaaaatgggtttgatcagaacgcccccccccatgcctgaaacggcaccaaccgtattcgccaacacgatcactataaaataaatgaacccaatcacacacttcccccctgtaacaaacctaaaatccgattgatctgcggcacaaattcctgcaagagttgctgataaccgcaatagtccccatccacatagatggcatctttcattcgtttgcagccgccacgacacattttttgaaacgggcaactcagacatttctttggcatttcgggccgttgacacacaaacgtttttgcaatgtcctgttcaaataactgacgcaaggtctgttcttgaatataccccattcgatagtcatctaacacatagaaatcacaaggataaacactgccatctgcttcaatgacatattgcacttgacagtttcctaagatcccgcaggcggtgaattgttgcttgaccaataaattcaaaagatcatcaaaaagcttgatactcacataatgcccctccgctaattcttgcagccataactgcaaaagctggtggtaaaatcccgcaaaacgttttggtgtgagggcatagctatttctttctttcgcatctaaatcatctaaacaaggaataaactggacaaaatcgattttttgttcttttagaaagcgaaagactttcttagcctctttagccaatggattggtcaggacacaaagcacattgtagccaatctcaaagtggtcaaacagctgctttgtttgcagcactcgctgaaaagttcctcttcctttcggatcgacccgatgcaaatcatggtagagcggatggccatcgatcgagagaccgacccaaaaatcatgttctttcaaaaaagcacaccatttttcattgatcatggtcccgttcgtttgaatcgcataatggacctgtacctgcttttgctgttgatccactagttgggtcacttttcgaaaataattgaggcccgccatcgttggctctccaccttgaaacgctaatgtcaattgatcaccgtcttctaagtctgcataaatattttcgatcattttatctgttacttcttctttcattttgccaaacgagcggacttcccgcaaggaactgacattggcataaaagcagtagctgcagcgaagattgcagagggaagatgcgggtttgatcaatactgaaatatgtttcatggtagaagcctcgattctaaataactttttgaagttgctaatttatttaatttcttaatcccaaacgaatatattcactttctggcacttcaattcgatccatgatttttattaatttctggatcatcctttcttcaacgtcaggattatccagtggagtcaactgttgcggatcctcctccaagtcaaatagcaaatggccaactgaataagaatcaatgtatgtggagacttcaatttctgtataaggatactgatttgtgaagcgatttccctttctttgcttcatggtatctaatgcttccttattgatgaacccccttaacatcgcgtaattcaatgtttggatagtgattgggccgttggaaggatcaacagacgcacgcatatacacgtacttcccatcataaatattgacatgaccgccatttgttccaaaaatgatttcatcatgtaaaacagtctccttagactttagagctggcaataatgatttaccatccatatccaattcattcgcaataccaaaataatctaataaagttgcaggaatatcgatcgtttggcttaaaacagaagtatgggtatccacttcagcatttgggtaactgataaaaaatggcaaatggataatttcttcatacataggagcaacattctttcctaaccaatcatgctcaccaagaagaaaaccatgatccgtattaataatcaccaacgtatcctgccacatttgattcgtctctagaaaatcaatgacttttccgagatgatggtcacacattgctatcaatgcagcatattcgttttgtaattcaattaaatcatcggaagaaatgtcatctgtaacccgaccatactttggccaaaaataaggtgactcatttggacagtcctcataaagtttacgatatttttctggaacaaaaaagggttcatgagggtcaaagcattctatttgcaaaaaccaattatcttcttttttatattcttccaagaaatcaagtccagcttgaattgtttgaacactcgacatctcattttcatcaacttgtcttgtgcggttcgcaaaatgctgttcaactgaaatgccttgcttattcaaaggatttatttctgcatggccttcagcaaatttcctaggtacccagcgatcaccttcctgcccgcgaaacccctcccaagtagaatagcgattatgataggttgcccctccatcctcaaaatagtgagaatggtcggtcactaggtgacagtagatgccattttgttgtagcacatcaaaaatggaatgatcaaaaggctccaattgcccccacatgcgatgcataaagttatatcttcctgtatgaagttcacgacgtgctggcatacaaggcatacttcccccataaaaattatcgaaagtaaccgttttttcccttaagcgatcgaaatttggtgtttggatccaatcatttccataatttgacagaaaatcttttgacaacgtatcaaacattagcatgatagcgcgcatattttcccttcccttctttactatcgtatcatatagaacacaacttaatgaatcacttgaatgacttcattaacaatatctgggataacatccaaataagtatcagtatttgttacaacaaccggtgtgatgatcgagtagcctttggattgaattttttctttatcaaatcgaatcaacagctcgcctttccttacttgctgtccttgttttacgtaggaagtaaagaaatcgccttttaagttaacagtatccattccgacatgaatcaacaattcaatgccattcgtagattttaaaccgatcgcatgattcgttgggaacaatgtttctacagtagcatcgaatggcgcatagatctctccattgcttggaacaatcgctacaccttttcctaataacccagaagaaaaagcttcatcttcaacatcagccaatgtcagtaaatctcctttgataggcatctcaatctttgtttccgtcattaaataattatctattgctatctcttgctcttcctctgattcagcttcttctcgatcttcagtaggatcatacatgaatgtaatagttaaaacaaacgatagtgcaaatgccacactaattgcaagtgcatagccataaaaaccactgccaattccatcactaggactaatataatttggaagactaaaaacgcccattcctcccatgataaatgattttgtcccaaagaaccccatgatcagaccacctatggaagaagaaatcaaagttgcaatgaatggtttcttacggggtaacgttaccccgtaaagggagggttcagagacaccgaaaagactagaaataaaagcgggtataccgatcgcacgaacagaattatttttggatttaatgataaccgctaatactgctccagcagtagcaaatggagttgcttgtcctaaaaccattacaggatcgtatcctaatacaccaatattgttgatagcaatcgggataatcccccagtgaagaccaaacatgacaagaacttgccagattgcacccaccgctataccagcaacaatcgggctaaactgataaatacttaacacagcagcccctaaaatatttccaatccatgtggctattgggccaatcacgataaatgttaaaggaaccatcaataaaactgttagaaatggcactaaaaagctacgtaaaacgctcggaattaatttggtaatcactttctccaatttcgctccaaagaaagttgcaatcacaattgggataacgctagaactataactcatcagaataactggtatacccaaaaaagttacataaacaggtgactcaaaaatcgtaccattaaataaggtataaagaggttctgtattagcagttaaccctgacaaggccggatagaccattgccgcaccgatagccataccaacaaattgcttcagaccaaatttctttgctgcggtataaccaagaaaaattggaaagaaatagaagaagcagtcaccagcggcttgcaagatggcataggttccagaagtattttcaatccaaccaagagaaacaaagagaacgtttaatcctttgatcattccagtagctgccagtaaccctaatacaggtgtgaaaataccagaaataatatctataaaagcatccaaaggtcctttcttctcctttttttcttccgaggcttcgtttgataacccagcatagtcaataaactcttgataaacttctggtacgtggtttccgatgactacttgatattgtccaccactttgtactactgtaactacacctttcgtttttttcaatgctccagtatctgcaattgattcatcttttaaattgaaacgtaaacgagtaatacagtgagtgagaccggcaatattttcttttccacccacatttttcaatatttcctcaactaaatctttgtatgccattttattcatccccttattcataatcaaaaaggcaagacaaataattattcccaacaaaggaataattatcagtcttgcctgctttaccagtaacaacctctattcgttctctattaatttttgaatgggtagcgataagtataacttttcatcatcacttagagagactttcagatactgctcaaccaaaatcatcgttttgtaagctgctgggtattgactctgaatgtgctccagcaatggatttttgcttattcatcttagtccgggtagtcaatcgttggaagaaaaagcgcaaatgagtgataaagcgatcaaacgcaagcgaatcttcattgatttgaattttattagatagacgaataagtgaaataatatctctaattttctttgcaattagctggacatcttcaggttgatcgatctcatctgtcagctgagcattgatcaaatgcattgcaatattccctgcttcttcttcttcgaactggatacccgttttttcattaattaaaaatagtgcttttttccctatctcaaattctttgggataaaacttcttaatttcccatgaaaggcggttataaatactcattccctgtttgtgtaatttaatcaaatgatataaatgatcggttaaggatacatataatgtttcacttaactcatgctctagatcatttttagctaatcgaataatatcatcagctaaggaaacgtactttgccgggattgattccattaatgtcaaaaaacgttcagaagctttgtttttatgcaatacaaatactttctctattttcgtctcgtctgctgcttgtcccggtttcattttaaagcccagcccggtgccgatccaaataaaatctttgccatcttttccgaccaaaaccgcattattatttagaatctttttgatcttcaagacgtttctcacctccttaaaatgaaaaaaggctatacctcaatacatgtgtaggatccatacacacgtacaaaggtatagcctgcattatcagtaactacccatttgattgtttatactatactatttatttgattttcgtgcaagcgtttttatcatttttttctgcttgcatgtgttttgttgagtaaatactccattcctactcctcatccagtaaccgactttgtccttcgatcttttggatctctgtgatgtcttgcgtgacttccagacagcctagatatttccccgttggatttttcaacgcaaaatagcgaatatagatttttcgtccccgcatgtcaatccagaaatcagctgtttctcttttgtctgaccgaaaatcgtctaagattttttgaacgatgtgcatacttttaggtgggtggcaattcactacttctcgaccaatcactgaatttgtccgggggaagactcgactcttcccttcagaataaaaacgtacccgatcttcattgtccacaaacgtcaaatcgactggcaatgtttggaacatagcaatcaattgttccagctgcaaggaaccggtgggaaattgaacggtttggttcgtgggagcagtcgttgtcactggcggttcagcgaattctccaaacccaagtcccgcggcaataccagctgtggtttcttgggcctgtttgatggccaattgacgagctggctcccgttccaattctttctccagtgactcttggcttggtttccaaggcaatggttcaggaatataagcaaacccaatgtcaaagctatcttccgcgatccgttgccaatccgctaaactgaagacatccaatgtcataggaaccatgatttcttcttctttaaaaatcatttcttcaatttcagattttactgcctgccatttttcagcaagaggattatatgctgctttgtcagttgccaaatactggttcaactctttgatcatctcgcgaatatcatcgtcgactccccacatgactttcggcggagcagagatgccatacttctccatatatgaaaagatcagcgtttcttttcttgcataatgtttgtcgatctgtaacagatcctgcagtgctgcttgcagacgtcctttttgtgaccagtccccttttttgattttcttgagcaatccatcgatttcgtccgtcaataacgattgcaggacttggttttctagcttgagggtatggactggatgaccaggttgtccatattcttcatttgaatgatggatctcgttgatcgatcccttaaatacagccgcatgaatattgcatagacgttggatctccgaagggtctaaaccgctttgaatcaatgctttttctgccgaggtgatctcagtgacatctacgccgtcaaattcttcattgaataagcgtttggcttcttcaaaagaaccgccttgatgaagcaagctcaaaatttcgacgattcgttcttgccgttgttccttcgttctcatttgtcgactcctttcacaagaaaaccttgattttcaaaagattgaatgattttttccaaaggtatctttttcatttgtgcgcctttcggaatcgtcatatagcgaccggcagtttggagcatgccgggtttattgatggcagtaaagccaagtttgctcataatatctttgatttccggatgttccgacactaaatcaaagagattttttgagaaatctgcttctttcattcttatccttccttctactgagaataattctcaatcaactgcatatattatatacgaaattgctcacaattacacgatcatttccaaatttatctcccctcacttggcacaaaaagaaaagaaccacttctcgacctctgcgagcgaatgattctttaatagcaagatgaaactcttgatttagtgatagaaaataatcagctgcgatagcgacacacgcgattctctaatccatccaccacaccaaagaagaaaaagcccatcaatgcaatcacaacaatgcctgacagcatttgctcataatccattttagaccaagcactcaaaatcaagtacccgacgccataagtcgtattatagttttccgcaaagaacaaggaggcaagcgagataccaatacttacccgcatgctggcaaacaatgccggcatgattgctggcaaaatcaagaaacggatctgatgcagcgggttttgcgtgtaattttgcatcacttgaaagtaagttgctgggatttcttttaccccatctcgaatcgaaaccacaacttgaatcacgatcaccgaaaaaatcaggatcacctttgaaacattccctaaaccaaaaaaaatcatgaaaactggtagaaaagcgacctttggaatcggatataagaaatagagcagaggatcaacgattgctgctatttttgttcttccgagaaaaatccctaaaggtataccgatcagcaacgcaaaaaatagtgagatcaggacacgaatcacactggcccctgcatgtaaccctaattctgcacgcaattgccaaaatcgttggaaagtttgataagggtccggcagcgaacggttatccgctaacaagctgattccccaccataacaataaaaacgacagtgccccccacaaaaaagaacgtccggctttcatctgacttctcctctcatcttctttttcaatgccaatgaaaaagcataaaagtccatcgtctcacggcggttagcttggtggaaaactgggtttttgatctgatgtatttgatgttcttgaaccaataggatcgtctcgccaaggtaagccgcttcttctgtatcatgggtcactacgactaaaccgttcgcaagtcgttgttgctcagataaaatcagattttgcgtacgttctttggtttcctgatccaaagacgatgtcggctcatctaacagtaaaaatgctggactggtcactaatcctcttgccattgccactcgctgtttttggccgccactcagttgactagggaaacgcgctttgaaagaatctagttctaacgcttgtaagcacgtttcgactaacttttctctttggtttttggggactttttggatttgaagaggcatttctaccgcttgataaactgtctgccacggaaacagacgtaagtcttgaaaaaccaattcgatctcagaaggatggctatcgccataatcgatatgacctgattgcggcagctgccaccctttcaacaatgagagcagggtgcttttaccaacccctgattttcccaagacgacgtatgtatggcccttatctaaggttaaatctagattgttaaagattaagcgatcttgaaatgaaaatgcgactgattctaaatgaatcgccataaattggctccttctttctaaaaaattgttgttccctctttcacattctatgctatactgattgttgcgaaaaaaaatagaaagggatgcatttgatgttccgcacacttgtgtttcatgaaatacgaccagacaatgagttaagtgagcaaccaagaccaatcgaagttgccgatggctatcaagatgctcttccattgccgttattcaatagctgttctcattttaaacaacaaatcgactttttgaaagcagaaaaatatcatacccttactttggaggaagtcaaagactactatcttcaaaagaaagctttaccagaaaaagcggttttgttgacgtttgatgattgctaccaatccatgagggaatatgcctacccgttattgaaagaggccggcttcaaagcgaccgcttttgttgtcagcggttggttgtttgctgaaccgagcccttataagccggctgtttccaaaacactcagtcgctcggaattgaacgaaatgagtgatgtttttgaatacgccaatcatacgactcacttccatgaacgaaaaggaatgatgggccgctcaatgtgggaaccggctgaaaaatttgcggctgatttagattgctgcaatcaaactgtagcgatacaagatgtttttgcttatccctttggtttctatgatcaacagacgatcaaaacactagaagcgaaaggttttgtcttgtcattcacgacgattccagggttcaacaccctagaaaccccacgcatggaactacgaagagacattattcccttctcattggataagacatcttttgaacaattattcaaaaagacccattaagaacatcccttcaaggaataaataagaaagaggaacgaaaaatgaaaaaaacgattttatttacttgcttatcattattggctttagtagttgctgcttgcggaaacaattcagattccacttcagaaactaagacaactgacacctctgcgacaactgctgaagtgaccgatcaaacgttgaatgtggggattttaccagcagaatctgcgattccaattattctggccaaagaagaaggctattttaaagatttaggtctaaatgtagaaatcaaatcttttacttctccaaatgatcgcaatgttgccgtacaagccaaagaattggacgcaactatcagtgatgtgatgacagaagcgacgtttaagcaaaatggcattgacatgacaatcacttcggacattctagaagactttaaagtcttagcttcgccaaattcaggcatctctgaaatgaaaggattggctgataaaaaaattacccttgtaccgaacttcattttagaatacatcatggaccagtttgctgctgaaaatgattttacttatcaaatcgttgacattgcttcttttgcggctcgttctgaggcactattaagcgatcaagttgatggtgctgtctacacagaaccgcaagcgagtatgttagccgctcaaggtgcaattgttttgggcagttccaaagaagctggcatcaaaggtggtaccttgcaatttatgactgatgtggtaaaagatcgaccacaagatgttgccgcattttatcaagcttacgatcaagccatcgattatatgaacagacacaaagcttctgaatatgctgatatcttagccgactatcagttcccagatgccatgagtacttacttagatagccaaaaagaagactatccttatgctgccaaagtcccacaggaccaactagacaaaatcgtggcttggactaaagacaaaggacaaattgatcaagcttacacttatgatgaattgactgattttagtttcttagcgaactaattcctgatcacttattacacaaaaccaatactcgaatccatcaaagccagtgctgtgatagattcgagtgttttttatccagccattatttgacggatgctcggtcaccgagtatcattcactaaagggttgtgagcgatgaaaactactttatctgttcgtttcactacataagaaagggagaaaatataccatgcccaaaattgatctttatttactgcaaaagccagaagagacacaattttatgactatttacctcaatcggagtcttggcacagcgcctataaacaacttcatggtgaatccttggtgattcattcttctgttttgactgaaagcattctgcctttcattactcacccacttgtattggaacttctagagcaagaagatctcgcgtgcttgcctttagtttttgcagaaaacaacctttattgtaaggggcgtcttcctacgctcaccgaatgggaagaattgacacacgttggtatttcgattcaggaattagatgaatcaccgagcgccacgaaaacagcggtctatcatgatcttatatgatggggaaaactatctgctaaactgtcgttggtaagccttctcctgatgaaagattcggtctttatagctataaaaaacaactatgaatgagagtgaaattatggaaacgatgacttttgaagaattaatccaaatcaactgtttttctgaagaaaaagaagaacgaaagaaagcagctgaattattagaatatcgttatggctgcgagattcgttgtggtgagatggacaaaagtgtccgctttgctcaccatgctcgcggctgtacgatcattgctgcgaaactttgcgccaatgttgtgattttccagaatgtaacgattggttcaaatcagcggtttaaccggaaaaagaatgcctgggaaaatctgggcacacctattttagcagaaaatgtaatcgttgcagatggtgccaaaattcttggcccagtcatcatcggtgaaaattctgtgattggagcaggcgccattattaccaaagacattcctgccaatagtgtagcctttggcgtcaatcagtacaaaccaaaaaatcccgacttcgatcttatcatcaatgaccaaaatatccctggagaagagatcatgcggatcaacgcagaacgcgtagccgcatttaatcagcaaaatcaacgctagcagatcatccgattatcgctagcaagacaaccaaggaattataagcgatatgagcaaacacagactcccatggatttttgttgcgcaaatagacgattgtcagccaaaatccaataataaagtaagggtataacaaaaaaatattaccattagcattaacaatatgggcccacgaaaacaacaaaagactgcacaatgtcgtaacaattctcagccatctttttctaccagtataaataagcgtatagcgatagaacatttcttcgaacaatgggcctactactaatgcccccaatagtaaaggaacggttctctgagacgatggataataaaaagtcattgattgttcacctggaaagataatctggttgaagaaaaccgttgttaaaagaatcgctacaaatgtcagcaagcctatttttatcaatgagagaaccttcagttcttttaaacgatccaacaaatccctataaaaaaggataacaaagaaacaaagcaacactagcttggcgcccaactcatgatagcccattaaaaatttcgcataggaagaaggaattccatgtatggctattcctttccagataacaaaagccaaaagaaaaagcagtttcttcaagtcttcactcctttttgagtagtttcactagaattgcatggtgcttcgcttcacaattaacctctatcaggattcttctcgttccgttctttctcatgattctctttgggtagtttttagatcattctcagcatttttttactcacactacaattatacactataaaaaggtatcaaaaaaacattcatccgaaagaatgaatgttaatcagacatttttttactgaacaatgtcattgactgattggttttttaggaagaacagaaatgaccgttctcgcgaccaagagatagcaccagataacaagaataagctaatggccgttccttccctcacaaccaaaggaaatgaaaaagctgtagaaaggccgattgagattatgacacacagcacatcaacactataccgatattgtttgaaggaaaagcgacttctatcagccatcagctgacaaaaattttcaataggaaatttcaagtgattgagtcgcaacacttgtcccgtagcgagtcctgaaatcaatgtcccaacgataaaacatgtgacttgtgccaaatagtttggcactatcagttttggcagtaagccatataaaataccattgactaaattgccaaagaaaagcaatgctgccatcataatcaaatagttgatccatttccgataacggtttttttgactgtggtccagaaaccaacaagtgactaagaagagcagattgatggctgtcgtaatggttccgaccttgatacctgtgattgtggatagtgagacattcaatgaattaaagctgcttacaccaacagctgctttgattgtcaagctgatccctaatgcgctgataccatagaaaaacagtgaccaaaagagggttcgtttcatatgagatctcctttcatttgctccttctccattatgtggtatgctaagaaaaacaactaggagatttctcctagaaagagaggaaaaatgaaacgaaccctttatcctgttgccaaaaagtttcatcaattggacttgcctttttccactggaacattagaacagtcctctgtttacgagttttctcacaacgagatcatacaagaagaagccgggacactgactcacttgtacgtgatccttgaaggaaaagcaaagattatcaagtctcaagccaatggcaaacgatcgattttacaatttttgcattccggtgatttcatcggagatctgaccttagtgtccgctgaaaaaacgaccaaagaagttttagcgatcggtccaactgtttgcttggcgcttcctatcgatcatgccaagcaagtattgatgcaagacattgattttgtcaaaatgatcagtcaatatattggcgataaattaattagacggatggaacatttctccatcaatcagacttaccaattgaattatcgtttggcgctgttgctcttggaagtagctgtagcgggaatttatcaagaaaaactcacagaaacagcagaataccttggtgtcagttatcggcacttgacctacacgttaaaaacattcaaagaaaacgattgtgtctatcgtgaatctaggggttatcgcatcaatgaagcaaaccttaagcaattgattcgatcgatgcaacgcgaatagacacgctcttttccttctatcacgcttctttgctgattgcgcatgctatttgctaatttgagaatggccacagttgaatagccaaactgccagtccctgagaagacgatttggtcttgctctttttgcggataaagtctggaagtaaaggtatactccccattgtttatgaacacttccatcgatgaagtgtccataaacagttggatctgtcgtaattctgatagttgaatgcttctttttttgcgtccatagccggaaggcccatgagaaagagtaaaaatatggccatcataagagagaatcgtgtcttggcgcaagagaagctgcagtttttttgtctgttgggttagctctacctgcagttcgtagacctctccagctaattttggagcagtaaagctatcctttaactcgacattccagaagaaaggctttccacgtaatttttgatattctggcaatggttgttggatcaatcgttgtccattgaagctcagttctcgcggcaatgtcgccgcatgctgccatcctcgagtaacagtgggattcgagtattcaggacttgtgtcccctagtcccatccagccccataacaatctgcgccctttttgatccaagaacgtttgcggagcataaaaatcaaaccctcgatccaattccacgaaatccgatgttggcttaaatttcaaatttttccaatctacttcccctaataagtagccagactggtataaattattgaaagcataagcttgcggatctactccctgtggtgaaaaaagtaaaatatcttgtccgtcaagttgaaagaaatcgggacactcccacatataaccaagggaataatcatcccctaaaaatatcccttgatacgtccattgtgaaagatcctctgactgataaatcaaaatctttccttcactttcccgagttcgagcccctaagatcatatagtaacggccctctttttcaaatacttttggatcacggatatgatcggtaaaccctgcaggatatgcttcatgcgggatcactacttcttgtttttcaatcgaataaccatcactaatcacatggaccgtattttgttctctgccactaaaagtataatcatggtccccttcgtttttcacatttcctgtataaaagaaatggatctgatcatcctttacaatcgcactgccagaaaatacaccatttcgatcatacgaatgttctggtgaaagaaaaattgcttcttctttgaaatctaccaaattggttgacgttttatgtccccaatggggtgcttcttttcctgcaggattttgaggaacatattgatggtagaaatgataaaccccattaaactgacaaagcccattgggatcattcatccacccagtttccggcattaaatgaaagtacagtcgccagttatcctgagcgatctttgcttttagttccgattgttgttccagctcttgccaggcttcttttgcacacaaatccatccaccactttcttctctacaatttttccattaattctcggttgcgcttaacgtttgaaggtcatcctcaatcgttgtttcttcattcaattcatcggaaatctttctccgctgcagttggacgcaggcaaagcccacactaaacgcaatgaggatcactgcaatgtatttcaacatggcgccgaaatctcctgtatacaacaacaaaccaggaataaatgtaatgcccattcctgttgctgccaattgaaaaacatacgtcatcaagccgccgatggcccccccaaccatgccagaagcaaaaatacgcaaggaccgaagattgatcccaaacaataatggttccgtgatcccaaacaaggttggtacagctgcactaatggcattcgagcgtttgactttgtttcggtaaagaaaagcagctgcgattgctgccccaaattgtcctgccatactcgctgttcctagaacttgcaagacattctctcctgaagtatttaataaaccaagttcgatgatgctcaatgaatgatgcaaaccggtgataacaatcaattgctgaaccgctgcatataagatatagccaataccaaaaggcgcttgtacgaggtaaacaatgccgttgatcactgctttttctgcaacttgcaaaatgggacctaatgcaaataaaactaatgtcagcgtcactacgatagtcagaaatggggtgacgactaaatccatcatttgtggaacaaattttctaaatcctttttctaatttggaaacaagccaaccaacaataattgcggggaaaatcgaaccttgataccctgaaatagaaagaccgaataaatgaagcggctgtgcatcgccactagcaactgcccaagcattgggtaactgaggagctaccatcatcaaaccaacaacgatcccgatgatcggattaccgccaaattttttggtggcactataagcaatcaatacaggtaagaaagcaaaggctgtatctgtcagcatttcaaagagcgcataccagtccgcactaaaaggaacccctaattcaactagcagaccacggatccccatcaaaagtccagttgtaactaatgccggaatcaatggcaccaacacatcagaaagagtacgaacaactttctgaacaggcgtcagattggaataaacatcttctttaaaggctgtctgctgctcaccatctttacccattgtttgagcaaaagcctcataaacttcatttacttttccagtcccaaaaataaactgatgctgtcctgtattaaagaaataacctttgctttcagaaatgttttctgccttctttttgtctagcaacgcatcatttttcaaaataatgcgtagtcgagtggcacaatgctcataatttttaacgttttccttaccacccactgcttggagcaactgatcaatgattttctgatctttcattttaattttcctccatttcaactcactttattttgtggaaccggttctacaagaaggataacagaaaccgtttgcaaaatcaacccgttttatcaaaaaaaaaaagactgtgacaaagtcatcatccaacaagttaaaccgaatcatatgctattgtgatagattcctcggacttttgcgacgaggagccactgcaccgcaggagccataatagagactgtgacaaaatcatcatccaacaagttaaaccgaatcatatgctgttgcgatagattcctcggacttttgcgacgaggagccactgcaccgcaggagcaataatagagactgtgacaaagtcatcatccaacaagttaaaccaaatcatatgctattgcgatagattcctcggacttttgcgacgaggagccactgcaccgcaggagcaataatagagactgtgacaaagtcatcatccaacaagttaaaccgaatcatatgctattgcgatagattcctcggacttttgcgacgaggagccactgcaccgcaggagcaataatagttaaggttcggatagtgttacttgtcggagacttatggcacagtccctttcacgaatcattatggtatttgttctatgggaatcgttgattgtttgatcaccagttgattcggtaacttaatcaattctggcacttgaactttttggatcaacttctggatcgtttccaccgcatcgacacctaactggtggtaaggatagtgagtggtcgtgatcgtcggaaagacataatccgtcgaatcatatccaccgaagccgctaagggagaaatcctccggcactcgcaagcctaactcatgcgcggctttcaatacggcaacagcaatgttgtctgtggcacaggctaaataggtcgcttgattctcttttagaaataagcgagctttttgataggtttcacttctggaaaaagacgtttcgatgaaagataatttggtcccttccatttgagcgaccacatccgtaaagcctttttttctcaagatccctactgcttcgtctttttcagtcactccgataaacaaaaaagaccgatggccgagttcaattgcatactctgccagtttctctcccgcacgataatcatcatggacaatcgaatggactccttgtaagtgttgacccaacatcagtacaggaacggtcaattgctgcaagacttgtgctagctcactcgtgatctctctagccagcataatgataccagcaaccttttgcttgaccagcatctcaatattttctaattcgcgttcttcattttgattagaattcgtgattaacaattgatacccattctttcgagctgtttcatcgatcccttctaacacactgttggtggaaggagaatccagcctaggaatgatcactcccaacagttttgtgtcttgtgcttttaaactgcgggcaaacgtattgggccgatagccggtctcttcaataattgcatcaatttttttacgtgtttgctcgctaacatagccattattcaaatagcgggaaacggtgcttttcgcaacgcctgctttttcagcgatatctttaatcgttaccgttaccatagtcaccctactttgctttttcttttattataccaagaactgaaacaaaaataagcactgattctctttcggatgccattcacttcatcaaaagataggaagccacaaaaaaagatgcttgctactcatgaaagagctagcaagcatccgtttatttctcgtgatcaaacgttcaagatccacataaaaccaataaagacaaagaataacacatacatgatcggtgaaacttctttaccacgtttggccgcaatcattgtgattggatagaaaatgaaacctagcgcgatcccgtcagaaatactataagtcaaaggcatgcctaataaaatcagaaaagaaggaatcgcgatttccatttcatgccatttgatttcttttagtgattgcgccatcagtactccgacaataatcaatgctggtgctgtaacctgagaggtcactactgataaaagcggagaaaagaatagaccaaacaaaaagaaaatacctgtggtcacagctgttagtccagaacgaccgccgacagcgatccctgctgaagattccacatatgcgcctactggagaagttcctagtaatgatcctgccaacatcgctgtcgaatctgacgctaatgctttccccactcgaggcatcttattgtctttcatgaaacctgcttgattggctaaaccaactaacgtaccggcagtatcaaagaaagtgactagtaagaatgttaggacaacgacccacatttgcaatgtgttgatgtcaccgacatgcttcaatgcgactaaaaaagtcgacgacatactaggtgctgccgaaacgatcgaacttggtgcgtggatcaaacctgtcactaaaccaagaatggtcgtcgctgccatcccaatgaaaatcccgccaggtactcgacgaaccatcaacacagccgtaatgaccaagccaaagatcgttaaccatgtcgtacctacactcaatgatcctaaggcaactaacgttgaatcgtcggaaacaatgatcccaccttcactaagaccaaggaaagcaatgaacaagcctatcccaccagaaatagcatatttcaagtcggaaggaatcgcatcaatgatcatttcacgaagtttaaaaatcgtgattgcaataaaaatcagcgaagcgacaaaaacaccggctagtgccgtttgccaaggcacacccatcccgatacagactgaataagaaaagaacgcgttgattcctaacgcaggagctgtcgcaatcgggtattttgccaagactcccatcaaaatacatccgagggcacttgctaatgctgtggctgtaaagaccgctccctcatccataccagaagcaccaaggaccgttggattgacaaaaagaatataggccattgaaataaatgtcgtgaatccagccaagagttcccgcttgatggtcgtgttgagctcatcaagcccaaaataagagtgaagcacatttttcattttttgaatcctccattattcagataggcgcgattattttccctctgaatccttaataaaacaacgaaatcaatgatataccaacttttcctccaagtaaataaacttttctaaaaatttcagaactattttcattttcatttaagatgctaaaaccgcttatttcccatacacagtgcctcatactcgttatgcttcgattgtaccacttgaatagtaaaaacaaaaaaagtctgtactgtcagaaacaaaaataggcagccaaagaacgatcatcttttccgcagaaaagccaatcctacctgacagaaagatcctatcaggatttcttttgctgacctattggttaaactgtttttgtgaatgatcaatccacaaaattttgctcttcctcaatcaaaatctttaattgttctgctgtcgttcgtttcattgacaacggcggcaactcttccaacgtaaagaaaccactggcagaggtttcactgttcgtcacaaaagaaccttctttgatcgaacaggcaaaaactaatttataatattgaaacaattgtggaatgtctttgcgcagattagtatcaaatactgcacaaagtttgtcaacttcaacaactaatcctgtctcttccaacacttcttttataacgttttctttgggtgagaaaccgacttctgcatagccacccggtaaagaccactcttttgtatgaatgtcttccactaataagactttgttatcctggcgaatcaatgctcgaacatctacttttggtgttggatacccttcattggcatctagcacaagtttaagcgtatcggttgtttcttccgtcgatcggctcatcaattccactagaatttctttcatttcgacataacgctcttgatcataaatatccttgccataatagatcccagcatcagcgattgctaacaatcgctgatacttctcaaaaatctcctgcatctgctcccctcgctttgtgctctgtcattctctctttatgataaagcaaattctggcagatagaaagccagacagcactaatttctaaagtcagctagcataattcaacaagcaatcattctttgcgatagatcatgctttgctggatttgctttaacgcaaaatccatgagaaaaatcaatcccatagccaataaactaccgatcaatgttcccgagaaacgccaaggaatcagatggagtggtacaaaactactgccgatagtcatcaaaagcagcacttgcggattggtaaaaaagttggcgatcgtataattgacaggcatgaaatattccgtcaatacattcaatacaatcaaaatagcagcttttgcttctaatggtaaatccagtgccatgagtaagaaacctaataagagcccaactattcctcctagcacacgaccgattgttctttttttgatgttttccatatgttcgccagcgagtaccgcggctgcagaaatcaagatccaataaccattgcttgctctcaacagatatccactataagtagcaataaataaaatcatcgaaaaatgcatcgcttttaggatcatttccggttggtggtaaagagcgacataatacttatctttgagagaaagctgctgaaagcgatctttgggtaaatgaaaaggcagcctttctgcagcggagatcagcaacccagccgccagagaacctacgattccataaagaagataggagctttgatgaagaatcgccagtaaagcagctgtcacattctgtgtttgatggtgaaaattgaatcccgttgcgtagagcatcagtacaaagaaataatctggttttggcaagcggtagattttggaaagtaaaaaagccgtgaaggacaagcagccgataataaacggtgcactccaaggaatcaatgaagtaatcgcccctaaaataaaggcactcaacaatgcaaaaccgtggatcaggattgcttttatattgtaactgaaggaacggtgctgaaaagccaaataagaaaaagctcccatggctccaacagaacaaatcatggggtctttggaaagaatcccagtaatcaaaggaacgcccattgcgatgccagagcccaatggacgtaatagtttggtagttaaattcatgacattcctcctctagcccctattgggagcgacatcttttataagtggttgtttgggaaaaaattagtatgtaaatgatcagaagaaaacaagatcttcaatgaaaaacacggcataactgatgaagcaagctatagaagatggaagatttttaacaatgaaaaaacaagcagcgactttctagcagagaggcaacggcctctctatcaattataggaatgaaaatcgaaacatgcaaacttttcaagaaagtttcgtgaatcacttgatctcagttaatctatcagaaaagacagtgctctctcattgccgtcaattatacggttcaagtgatataaaaaagatcaaaactattctggagcaaacaagaagttgcactcagttagttttgatcgaattattttattcctctatctcctttaggataggaaaaatttagtcctcttttattttacagatgcactagaaacagcatcgactacgacagcctctggcgcaccagttgtcgtagctgactctgcgttatcttcgtggacagaagcactggtaacagcatctgagttctcgtgaacagaagcgctagagacagcatcttcgtttcccaccaatttttgaccggtttgttgcagataccattcaatgattggtttgaaatctagaatatactcgttgatacctgcatattcgccattttcatcatgcatggcttggtaattgtggacgatgtatttctctggaacctgttttggtacatgaacccgaacagcatctgtagcgccgctgcgcaattgttggatcacccattccacatttttatatgatttttcagggtgacagtttgctaatggattgcccacctgaccgggaacacgagctgccaacatttcatgggcttcttgacgcaagttataatacaagaattgattattgctatccgcaaaggtcaactccatcggcattgaatctaaaaagtaattgatttgatcgacggtcaataatccacgatttaactgaacgtaagtatttccagaaacggcccctactgcttctgcagctttctcaagccattgatcatcagacatatcaacgccttccaccgttgtagcgatcttcccagtcgcatgtaaatcttctggtggcaattgtttaggtccagctaatgcagagactacgttaataaatttgacgaagcttgctaacgtgctgcctaaaaaatcaattgttcgttgatcgatcagattcccatcttcatcaaaagcttcttttgactttcctagtaaaaactcattccccggcatcacaagtgcattgactcctggggcatccaagatttgacgcaaatgcaactgtgatctggaagttccttgatcataatacgaagcacccacgaccattactggcttattttcaagaggatgaatcttaaatgaaagccattccaagacacttttcaggcctgctggtactgtatgattgtgttctggtgtagcaatgattacgccatcggctaaaatgatttttcgatttagttgctggatctctggactgttcgtttgatcatcatcttgattgaataatggcaaatctttgatttcgaccagttccaaagtaaaaagttcggtgaattgttttttgatgaatgttaataattttcgattggttgaaacttctgctgttgatccgacgataccgattaatttcatcttttctatctcctatcgcaattaaatggtttcccaagaaaaattttctgcttcacgtttattagcttgatgggcatgttgtaactgacttgtgatcgtcacaaacaagagaaaatcactgaatagctcccgcaattttgttacttgctcttcatctttcaggcgtccttgttcatcaaaagcttgcaatgagtgccccaaaagaaattctgaacttggcatgatccgtgcttttaattccggtgaatctaaaatctgccgcaaatgagcctgtgctctggaagaccctagtgtgccatacgacgcccctgtgatcataacgggcttatcaacaaaaggaaaaataccataagaaagccaattcaaggcattgatcagcgaagctggaacggcgtggtcatattctggggtactgatgatcacgccatcagcagcttcaattttttctgcaatccttctgactgcttccggcaactcatggtcttccggcttattgaataagggaagaccggcgatttcgacaagttcgatctccgcttcactagcaaaaaagtttttcatgaagtttaacaaatcgcgattcgttgatcgtgatgagttggttcctactaagcctataaatttcattttttattcttcctttccaaaataattttctttgatccctgacgtgtggcagacccgattctcccttgtgacaaagattccttcgattccggtctgagctttcaattgatccaccacttgaacgatcggtttaccaaataaacgagttgtccagatttctccttccaacgatgacttagaaacaatggtcagactcgctaagtcacttttggttggaaagcctgtttttggatcaatgatgtgatgataaacggatgctccttgctgtaaatagcgttcatagataccagaagtcacaagagaggcattcttgactttgatgatctccaatgattgctgccttgttccttgggggtctcttatacctatacgccaaaaaccatcctgatgttttggagacgcgccataggtcacgatattaccacctaaattgatcaaagcataaacagcatggttctgatgacagtacattcgtaatttatcagcaatgtagcccttagctaatgaaccgaggtctagcagcattccctgtttttccaagaagacactttgctcttcctcattcagacgaatttgttgcgggtctgtcaatggcaatagtgcagttacttctgagggtgtgaggacttttgcatccgtaaatccgatccgccatctttggacaagaggaccaatcgcaatattcaagtgactgtctgctgcacaactatgatatttgccgattttgatcagctcataaagttctggatcgacgaccacaggatgttgaccagctgcgtgattcaccgccatcaattctgagtggggatcgtttgcgctaaatcgtgtttcatattcatgcagcaggcgttctaattctgatagcaaccacattggatcgttatgggcaacttgtaatgtgatggttgtacccattctatgaatgacccttgtttcttctcgaaaaaagttttcacccatttgtatcccttctttgattccaaaaatcaaacgactcgctagcgaaccatcatttttgttagtattttcacaatcagagaatactcctttaaaacatttttgtcaatatcattatatatttttttatatacaaaaccgcgctaatcttatataaaaaaaagaacaaccttcgatctttcgttgctagatcaaaggttgttccctataaaacggatcaaaaataacgactcattttcatttgctttagtcatgcatcattatagctgttttttcatctgatttaactcattgatcaacagccgatttttgttgatttttgcaaacgcaagtgcatcttgtatcaattctagaatgacagaagctggttcgccggcagcttgggcatttttggccaactgtgcagctgcacgggccagataataggtcaaatgattctctgagcaaatggcgatcgcataatttaatagtgcgttgctggtttcaagatcattcgtttgcgcgtaaaaaaccccgcaatggaaaacgatattcaaaacgcgccagatgtcttccgttgtttggatgggatacgtataaatttcgctaaatactttatcgaaatatacttccgctttttccaactcagcttcacgcgcataagcgatgccgatccccgtgtaggccagcagttgaaatactgtgtcggtcgtctttgacatcagcaattgatcaaaatggaacaagacatccgtgaacggcgcctggttaaaaaccatctcgaatcctttaagataataataacgagctcttaaatcggcgtctttgatcgttttgggatcgattttctccaaaatttgagccaattgttcaaattcactggtaatcagcgaaaattcagctttttctagttgttcatctagttgtgaattcaccacattgattgaagaaaaaagatccactaaaggcagattgattcgattgcataacttgatcaatattttcaaggaagggacttgtccattattttcaaacctgctcagagttgcttgtgtgcaaataccctctgaaagttctttttgtgacatcccaacagcctttcgtgctgcaataaatttctctacattcaattgcctttcccctctctgcttcaactttggcagccattcagtatcgatatgattttagcatgtttttttgaaaacaggcaccctcttttgattttatttttcacttgtgaaggggaagattctatggaacaatcacttttctgagaaatcgccttttacgacagcccgctgggtttgatagcttcctttctcttttcctgtacgtatctcggctagctttgtttcgatcattttcataattttgttcaagttttgagggtctgctacaaaatctagttcatccccattgatctgcattttcggacagacatcaaaattttcataccaagcatcataccgttcgttcaacaatttgtagtaatcatacaaacttggatcatttgccacctgttcatacgaacgtcctcgcttaccgatccgatcgatcatagtctccaaagaaactttgatgtggatcatcaagtctggttgtttcattggggcggagtcttccaactcacgcagcatcgtgttcaataaattgtcgtattgctcgacttccattggtgagatccttccaagatctgcattcaaatgaaacatcatgctgtcttcataaatcgaacggtcgatcacattgtcatcgtgagacaaggcttcccgcattgcaagaaaacttttattcaaaaaaaagatttgcaacaaaaaagcatatctttctggatttgagtagaacaatggtaacacatcgttgtcctcaacattttcataaaatggttttgaagccatttccttcgataaaaaatcggtcaaactacttttacctgctccaatcgttcctgctatcaataacacatgcatccatccttcttactaaaatatcgttgagccatccttgtctcgctttttccctcactgataaacctaacactgaagctgattcaaaacgtaggcgtatctttacatggcatttggttagcagcaaaatactcataaaagaccttgtttactgatttctctttgataacaaaagatttctcgcgactaatgtctcagtggcaacctctctagtgtatcaaatccagcacgtattacaagattgaaggtcctttttccaataacgggcactcttctgctaacaggttgtcgtctaaactcgtgcgtttctcagagtcgtaatggcggattctttatgcttgtttgcctcacttcgacacaaatccctgctaaacgattatgacaaaaacagcgctccttccaaacttcaagatccattttacctaatctttaaaaaaagtaaatacaatatatagtgaacagagtgtaagaaaaagattaaaaaatactatatattgtgaagtaatggtatctaaaggaaggaaatattcagtcactgcagctgattttgttattcattttttcccccaaaaaaaacacaacacctgctctcctatcagaaaaaagagcaggtgttgtgtttaaaatgttgctattccacttcaatggatcagcaatcagtcgtttttgtccccttgaatcaaaaaacaaactctagctagggtatatcctttgtgtcagtgaactgatttccgcctctttccactaaagaatatctttccatgatccttaacgtaagatttcgatcgttttctcgattttaaccgttacacgaccgttcttgatcacataaacccgttcgggaatatcaatcaatgcattgcttttcgactttgtatctaacaatacaagatcggcttttttaccaacagctaatccataatcagctagtttcaacgctttcgccgtgttggtagtgatcatcggtaaaaccgtcggcaagtcggcagccccacctaagtgggcaactggaacagctagcatcgcaatctgaatcaagtccccattcccataaggtgtgaaggcattgcggatgttgttgcttcctaagcagatatttacaccaccatctcttaatttgcgaatcggagtgactgcacgacgcacattataaggatcgtttctcgcccctaaatgaagatcggtggcagacaatggcatgacattgatttgtgcttccgccatcaatgagatgacttctgctaatttttcaggcggcatcgcatgcaacgcggtcaaatgacctacggagacacgcccgtgatagccttctttaatggtcttctcacacagataaacaattgatgtctcatccgcttcatcggcgaaatcttgatggagatcaatgtctttatcaaactgtttggcaatcgaaaaaaccaaatcaatatgctcattggctggtgcatcattataaggaattccccctacaacgtcggcacctttttccattgcttcgatcatcatcttatcagtaccaggcgccttgaagattccttcttggggaaatgcgacaacttgcatatcaatcaaatccttgtattcttcttttaatcgcatgatcgtatcaaagcccgtaaatccttgggctggatcaaactctgcatgagtccgcacagctgtcgtaccatgaacgatcagcatctcaagtgcttgttttgcccgttggtatatgtcttcctctgtgaaagttggctttaattttgcagtaaccgcgatagcttcttgcagtgtgccggaattgttgggttcacggtcagcgatcaatgctttatccaaatgaatatggctttctacaagaccgggaatcagcactcgtccattggcttcgatggtctcatttgcaactgtttcgatggatggtgcgatctcgacgattttgccagcagtaatgccaacgtcttttaactcttctccatcctcgattcttgcttgtttaattagtagatccatttcttttcctccctcttacttacccaaaaatcaaaccaatgaacaacaatataattgaagcaagacttagccatttcacatttcctttgaccacatccaaaatggggatttggaatcctgaagataatgcttgcatcgtgatgttgacgaaactcatttgactgcctaagcccacgcccattgtgacaaaacctaaagcaatcggtgggaatcctagggaaacggcgactggcaaaacaagtgtcaacactgagcccacatacgctccagcaggaatgccaatcaagactccggttaaaatcgccacaggtactacaacaaattccggtgcattttgagctaccccagcaatgacggcaaacgttcctgtttgcgcaatgatattgatgaatgccaagaagattcccacttgaaaaagacgagtcagaatatacgttgatccatctaccattgcttccaccgattgattcattgaaaaatcagtacataagtaaatcaatgctaatgtgatcaccatataaacaagcggtgtgaagaaaacaaaaccaatcaactcattgactagcgggccgaatataactgcaaaaagcaagaaaatcgctggtaatgtgattttgaacaactcgccattactttttgtttcatattcattttctgcagaagctttaaagccgatgtgccggcgcttcgttccccaaaaagccaaagcgatagctaacacgacaaacaacaaccaaaaaggacgcatctcaacaacataagaagaaacgctaaagccgcccagtttggaaacaatacttgattctaaggaggcaggagaagttgtaaacgagacagctgccgctagcgacatggctgcaatcaattctggaaccactcccactgctgcaaaagccagtggtgcgatcaccattgcactgccgccgccaataccagacatataagtagctgctgcaagcaaaatgacaataaatgcagaaacatattctaccttgccttttgttcctcgtttagccaaagtcaaagctgccgtatagcttcccgctttgaaaacagccattgccacagcagaattgatgatggggacagtgatactcaacatcgttggcacagcttccagcagttgcgtattggcttctgctaaactgatacctccgatgatcattgctagtataccagcaaccagtccagcaatgatcatatctacctttctaaataaaagaactaaaaccaagaccaatggaactaaaaccaaaatagctttaaatcctgttggtgcaacgatttggtcaattgcttcttcagcatgtacagcaatgccataaaacattcctacaaacatagcagcaagcaaaaaaacccattttttaaatgttttcatttttccacgtccttttttggataaaaataaatgcattgaaaaaaacgaatgattcagtctattacgtaactagcaaaataggttattccatttagagaaactcaaacggggcctgctttctccttttataaaacaattactgccgattacctattgaaatcaaaatgagatcactcttaaaaaactacccctttcactacttgctattcagctacaagttctctgagccactcctccctaagaatcattccctgcactgtccactactaataaacggccacaagatgccgttggtgaatcctttgaagttgtcggacatacaaatacaccgcttttttgtgggaatgattcttccttttctccttttctgcctatcttcctgttttctattttacgcgaatgtgaatccgctttctttggacgttattctaaaaaaaacgatctttttttagccgattgtctaaatcatttgcatcaaagtgaaacaaaagcggctgttctgcctattctgaccagccacttttatcaattatctggttccactgaagaatcgcttaatccgctgatagaccagcaattgtttgcgggcacgttgaatccggcgataccgatgaggatttttttggtaaaacccttgatggtaattctcggctggccagaaagtcgtggctggtctaatctctgtgatgattggttttgcataatgacctgccctttgcagctgttcttttgacgcttcagcaatcgcttgttgctgcggatctccgacaaaaatgattggtcggtactgctttccccgatcttgaaactgtccaccagcatctgtgggatccgtcaactgccaatacaatgagactagctcctcatacgtaatcaaccgattgtcaaaaatgatttccactgcttctacatgtccgcttaacccgctactgacttgatcgtacgtgggatgcgggatattcccgccggtatatcctgaaagaacagaagtgatccctattttctgttcaaaaggctccaccatacaccaaaaacaaccccccgcaaaaatggctgtttcttgatgactccagtcagtgatttgatgtgtctttgttttttgagttgtttgagttgtttctatccctcttaactgatcataaaaatcctgaaaatccggtgtcaagttgcctcgaagtgccaatggtcgcaaagcagcttccaactctgataggacatttttttgttcttgtccggattctaaccgatctcgggctgccaacaactgggatcgttcccaatctcttgtccctggattgatgatcaaattgtaaagctgacttaatcgttcctcgtccatccttctcatcctctctgccagcaaaactttgaagtgttccatcctcttgcaattacttgaaatgatttatatgcaaattaccatatttccttcatctggcctactgattcgctttctgaccaaagaaaaaattctctaaatgacaaaaaaaccgaacaaatagcggtacagaccatcaacataggagggtctgaaattcctgtagaacagaaatcagctatcgttcagttcgaggtattttgctgtttggttatcttaagagcattgtttatcttgttagtgaaaaatacaatggacttaattcttctaatgcttcagtcgtcaatctctcaacatcttcgatgctctctgatggaaaccaaagtttgccgatttgaaaactgcgtccttgcagcttttcttcaagttgtctttgtttttgcggctctgagaggtatacagctaatgggcaatgatcttctagttcatgttccacctgtggccaaatataataatcagccaaatttttgtctttgctccattcttcaatctgccagcgtaagtcattataggctgctaaactccctgaacgttggccacttttgtaatgttggaacatgaaatagacttgatattgcttttgattgatcaatgcagctaggcaggcattttgattcggatgtgcctcattccgataagcacaccaaaaatgactgcgcaaattccaaccattcgtccaactctcaactttcggttgaaggtctgctgatacattggttgcgacagtcatttggatatgtttccatttttgccagctcatctgataatcctctttcagccgctgaattgtttctggtgggtagatgtctttgatttgtttaaaggcaaatacctcacgatcgaataaatcaaaatctgccttagcaaattccataatgtcaccttacttttaagctctatttttttagtggtagtaaacagcatctaggaacaatccttgggaaggcactgtctctccggctgcttttcggacttgattcgtaaatatctcatcgatcgccgaaatgtccattgtacccgcaccaatctctaaaatcgtcccggtgatgatccgtaccattttataaagaaagccatctcctttaaagcgaaaacgcagcatatctccttctcttgtgagtgagagttcctcgattgtacgagtagtggattttttggtcttttttaatgcagaaaagccaataaaatcatgagtgccaataaacttctcacaagctgcttgcattttgtcccaatcaagctcttgcggacaatgaaaactctgatgacgttcaaatacggttggaatcggactattccaaacataataactgtattgtttgccggtcgcattgtaacgggcatggaaccgttcagaggcttctgcgacctctttgatgacgatgtcttgaggtaggtagcgattcaggaattgcaacattttttcgggggacaaatcgcttgctgtcttgaaattggctacttgtcctctcgcatgcgtccctgcatctgtacgtccagacccgatgatttcgattttttcatttgtcatttgtgtcaaaatactttcaattttctcttggatcgttcgatcagaatcgcctaaacgttgccaccccagatagcgcttgccatcatattcaatcgtaagtttaatatttctcatttatgttaattgctcctgtcatcaatgatttaccccaaaaaaacgggttcccttgcttatcataagggaacccgtcaccggtgtaaatgctctaaagaagattttagcgatatttcaagaaaacagccaaagattcaaatttctgatgtcattaaaaacttttatttcccaatcactaatctccttgtatagactgcttggcccgaatgcatgactgcatcatcgacgatggagacgatccgagcttgtcgtgtcacagctggcgtccagttctcatcaatcacttctgataagctagtttcatcgatagactgaaggtaattaactgctaactcgacactagcagaaagataatccactaatagttctttttgattaacaattaccttggcggcttcttctggtgtatgacgccaatcttctgtatcgtcaggcaaatccaaagcaaatcgcttcgtccagtccgctagccaaagtggttcttgatccgctaatgcggaaatctgcagatcgatttcgcgagcggtatgccagatcagccaagtgactgacttaatcagtggctccggcatcgtgttcgcttccgcgatactcatttgtgccaacgtttcttcaaatcgttcttgggcccgttgcaatgtctcgatcgtcaattgtgtttccttcatgatactcctcctctttagtaagtgcttatctttactctactacagaaaaagggagaaaccaatgaatcaacctgctggtaaaaaggactgaaaaattattcttccgcataaatttctttggctaaattgaatgccgaccatgctttaggccatccggcatagaaagccaagtgtgtgatcaattcaacgatctctgcttgagtcacaccattttctttggcgattcgtaaatgagcttctaattgaggcacaccttgtgtcaaaaggctggcaacagtgatcaaactgcgatctctggcggacaattcttgttctctagaccacacttctccgaataatacgtcatcattcaatgccgcaaactgaggggcgaagtcacccaatcgttcgcttcctgctgtttgttttttcattctcattgcctccttatttttgtaactgctgatagtcttcctccgccacagcttcgagccattcaggcgttccggcagtaatagccagatgttcaaaccagctatcttttgctgcgccatgccaatgcttgatgccatcatgggtgacgacaatatctcctgctgtcaaaaattgggctggttttccttcttcttgataccagccttcaccaccagtaatcagcaaaatctgataaccatcatgatgaatatgccaattgttgcggcaacctggctcaaaagttacattcccaacgccaacattgaccgaggggtctgcaactaaagtgtttaaataactttgtccaacaaagtattgggcatacgcttcattttttgcgccacttgggaaaatcacgccatcttttacctcttcaaattttgccattgcttgtctcctccttgcatacctctttgtctgataccattgtgccattttgtcagctttcacaatcaataaagcggcaatcctttcaataacttacaagttcatgttactgcttgatccacataacgtccaatacttgttaagctgatttctatgcttgcaaagcatgcttgaatttcttcaaaaatgtttggactgtcggcgccaaaatcgtctctttcctccataccagaacacagttcgtttccagaggtggcgaaaaggggatgaattttatttggttttctcgatgatgaatcgctccagcaattgctaaagcagcaccaacattgttttcgaccaataaaagcacattaaaaatcaaattgtatctcccaacgattgtcaactcttcttcaacgaatcccccccacgtgcaaaacatttccaaaacttctttacgactcgaacaaatcaacggtgtggtgaggatgtctgcaggtgagatactgctttgatcagccaacgggtattcatttgcaacaaacagcccccagacttctttcttaggcaatggtcagccgattgtattgatccgtcgttgcaggatcaatcaaaatcgccacatcaagcaagcctttatcaagtttttccagaatatcattactagttccgctaaaaatagtaaaagacacttgggggtgatcagtaaccatttcttcgatgatttgtgtgagcaaataggagttttctgcttccacacaaccaatcgcaatttgtccattcagaatcgtctcctgataattgaacaattcttgttctgttttctgattcaattcaagaatttcttctgcgcgcttttttaaaaacagacctgcttctgttaaataaagtttcttattttggcgcacaaacaattctgtgtgcaaacgctcttcaaactctcaaatttgtctgcttaaagtgggttgcgtaatgttcagctttttagctgcttgggtaatattttgttcctcagctattgctagaaaatactttaatacacgagtttccatcgaaaactcctttcttctatgacacaacatttttcctactgttatctcagattttcgggaaaagaacgcatccttatttatctgtaacaacgaatactagctttattctaccacctaactagaaattcttgaccgctattcgtttggttcatccaaacaaaaaggcccttcattcactgaagagaacgaaggaaccgatagaattgaatttcagttgtttctaaaggacgtttttattacaagcgaatcggtgtagcagtcttttgcagaacattgtttagcgcttcaatatttgtacgtccttgggtctgcagccactctttcgccgcaccttctccctgagtcacaaaaggctctacaccgtttgcccaggttgctcgtccacaaagtacgccattgaattttgagccggatgttttggcaaattgcagtgtttcttggaacaattcagctgaaacccctgcactcaagaaaatatagggcagatccgttgcttccgcttgctctttgaaataaaccgccgcttcttcttttgtataagcagcttcctccgcatagccctctacatagttcatattcacagggacttccactttcaagacatcaacgccatagtatgcttgcgaaaattctcgcatcatatcatttactttatgaggttttttcaaagcatattctttcgaagtggtatctgggatagcagcatcataagaaaccagttctaagaaaaatggtagattttcagcaaggcattccgaaccaatccgttcgataaatgccttcttttgatcattgatctcgtcaggttcgtccacatcataatagagcaaaaacttacaagcatccgcgccattttcttttagccgtttcacagaccagttggacaaaagatcaggcaaacgacccggagttgaagcatcataaccggttttctcgtaggctaacaataatccagcttgttcatcccgaacttgggctgctggcaatccatactctggatctagtaaaattgctgaggcatagggcgtcaactcggctgacacgatttttttgaaggcactgatttgctctgtcgtgactgaatggtcttggaatctgccaatcatttttttcaaagcccctcgttgatcaatggctaaagcactaataatgccattttcattacatagctgttggatatatgcttgcttatttgataatgtcatgctttcactacttccttttttagttttctgccagttttccatttaaaatttcggcaatttcatcaggagactgtgcttgcttcaaacaatttgtcacctctttatgcatcaaaagccgtgccacttgagacaatagtttcaaatgtgtcgttcccgcttctgaatcaggtataaaaagagcaataataaaatcagttccttccccatccaaacttttccaatcgattttgctatttaattggacgatgatgacattggcttcttcgatactgtgatctttcgcatgagggatagcaaatccatccatcatccccgttgtactctcctcttctcttgttagcaattttctataaacagcagcttgatcactgctgatgcctagaataactgcttgtgctgcaaggaaggtcattatttcgtcttgtgtcacaaaatctcgcttcataaaaatgtggtctgttttgatcaacgtcatttgtcttcctcttttctattctttcgctgtttctttccattcatcagctgaaacttctgcttcacgtttttgtacactgcgtttttggatgaaccctaaaatcactccacctatgatcgagccaagtaaaatcgaacctacccaagcaattttccccgtgacaaccggcaatactaagaagccgccatgaggagcaggaacttggactccaaacatataggtcaaaaccgctgcgatcgatgaacccaacatcatcgtaggcagaacacgcagaggatctttggctgcaaatggaatcgccccttcagtaatatgcgttgatcctaaaataaagttgactagccctgcattgcggtcgttcgtatcaaaatatttcccaaaaaataagacagcaaatcccgtaatcaatggtggcgcgatacatgccgcagaaacacctgccataaaggtatggtttccttgagctaacaatgccgttcccgtaacgtaagcggctttattgacgggaccgcccatatcaaatgtggacatacagccaacaatgatgcctaaaatcaatggattcgaattctggaatcctgccaagaaatccatcataccttgattgatcgcctccatcgggcttgctaacaaagacatcaccacaccaatgactaaaacaccaatcactggatataagaaaatagccttcaatccatctaattgtttcggtaatcctttcatgactttttgcaagaacagaataaagtacccagctaagaatccagcaaagatcccgcctagaaaaccagcgccaccagcattggccaacaggccgccgacaaatcccaccaccaaaccaggtcgtttagcaatcccttcagcaatgtaagccgctaaaatagggaccatcattcccattgctgtatccccaattccttttaacatcgctgatgtcggattataggtgggatcattaggatcaaaagagtagacaccccagattgcgaatgagacggcgatgatcacgccccctgctacgacaaatggcagcatatgagaaacaccattcatcagatttttataaatactatgtccgattccggcagccattcccccatctgcttgctccaatgcatcgaccgtcttgttttctgcaatcagcgaccctctcaatgcttcttcaattagctgatcggcatctttgattcctttgctgaccggaacattgatcacgcgttttcccgcaaaacgttccgcttggacatctttatctgcagcaataatgaccgcatctgcattttttatctcttctggcgttaactggttttctatccccacttgtccatgagtctctactttaatagctattcctttgcgtttggcggcttgttccaacgcttcttgtgccatataggtatgggcgatcccagtgggacagcccgttgcagcaacaatcttgtaagtggtcattttttattcgctccttcttttgatttcaatttgttcttccaactctgcaacatccgaaaaatcagttagtcccttacgaaaagcggttgaacttccagcagctaatcctttcttcaaattgacatccagcggctcacctgttaaataccctgcaagaaatgttcctaacaacgtgtctccagcacatgctgtattcactactttgcctttaggagagtttccagagtagaccgtatcttttgtcaagagaaggccgccttctcctcctaaagagagcagcacatgttgcgcaccactagccaccaatcgtttggcgtagtcgatatagcctttgcgatcattgatttcggtctgataccatgcttgcagctcttcttcattgggctttaacaagaaaggctgataaggcagacattccaacacctctgaatagcttgaatcaataatcagattcacttgcttttcaaagcaaatacgactgattgctataagaattttgggcgagacaccttgtggcatactcccagatatacagagatagtcaccagcttgcagatgtctaatttgttctagcaaaagattgatctgcttttttgaaatttcaggtcccttattcacaagtttgtactccttattatcgcgatttacatgcgtaaaaacgttgattcgcgtaaatcccggaacgggaataaaatcggtctgaatcgcttgttgatgcaagtagtcctcaatataattaccagtaaaaccagctttgaaccctaatgctgtactatcgataccaagttttttcatgatcaatgagacattgaccccttttccattggcttggatatcatcatcctttgtgcgattcacttgaaatggtttcatctcatctgtttcgataaaaagatcgatcgctagatttaacgtacatgtataaacagccatttgcgcccctcctttcctacaaacctattatggatcactacttgatgtaaatgttttcataaataaacaaaaccgctgaaaacttttacaagaaatacttcatgaccttgaagtaggtgaatctttcgatttacaataaagactagctgaagggaggcagaacatggatacaaaattaagtgagtcagagcaatacctgtgggattttatccaaagtcatatccttgagattccgtcttgctccattataaaattaagtgaatatgcaaacgtttcaacggcgactgttgttcgtaccatgaagaaaaaaggatacgaggggtttactgctttcaagcattcactaaaagaaaaagataataccaatatcaattttgcagcgcttgataaggtggacgaagggataaagacggcgattctaaagaatgaacaagaagtgatccgcacgatcaatatggtggaaagcggcaatatcgaagacgcgatccaacgaatcaaagctgctagacgaatcatgatttttgctcgtggattttctgaactgattgctcaagaaatgatggtcaaatttcagcttactggcaaatactgtgagatgcataccgatcccaacatcattaagaacatcagtaagaaactatcaaaggaagatatcgtgatcttcgtttctttaaatggtgaaaccaaagaattgatcaccgcagctgaaaactgttatgaagcggagatcggtaccattctgctgacagccaatcggcactctagcttaatggcgcatatcgaaattccttttgttggcttcaaatcagaaggctccttctttccagactatgaagttcgttcaagactgcccctctcgatccttgctagaatcttgctcgacgcgtatgcgctgcggactgcagaatcaaagaggcactgatatcttgagaaaatcataaccggtaaggaaactgtagttgatttgagatttttcaaaatgaaatgattcacgctgaacgcattgtttttgcagttattcatatagaattcgatactcgtcaaacgatggggttctttgatttttatccagttaaatttgcttatatttttttgtcaaaaaatgatcatccgaaaaaaatctttcgatttgataaagcggttcgtaaccgtctatctgatcgaaagatttttttgaactgtttgcgtatagaaatgcttcctttatttcgcctcctgattatcgtcggtacgaaacgtcaggcattaggagtcagcaactttactggataacttaactcgaataactaaaacctaaaacttagtagaatgtttcatcgtatgcatgcatttaacccaacaactacgactatcaccagcccgctcttgcttaatccaaatcaattggttgaataaaatcaacctgccatttcccctctttctcagaatagttaaaataccatagttgagaaaaagattgttttcgatgtttctttcctgagaggatctgcttactcacccggtcttccacataatcatagcagctaaaatcaatccgaatggaaaagctatcttcacgtagttgtcgataattctctacttgatgtaggatgactttctttgtatgattttttataccatcctctttattctgttgcaatacttgactgtgttccaacaatagtttgtcagtatagtgtctgctggatttttcaagtgcttcttgatcccaagcggtttggatcgcaaaaaagctcttttggatttcatgaagtaattttttcttttcgttctttttacctgggatttgagcgaataaatcattccttctggttcgttggtctttttttcgtttaactaaagagagaatcgcggctccgcctactgacgccccaaccaaaacataattttctataactgatgatgaaccataggggctataatatccataccctcgtcttccccaagaagctctggaataatgatccgaatagtcatcaactgttgtgacaccgccaaagccgccacgactggtcgaaccaccgccgtgtcccccagcaactgccattccctgcactggcagagcaaataaaaagaataaactaagtaaaaaagccataaagtagtgtttcttcattggataccctcttttgtctgactcagaaagcccgacaattttttcaaaatctttttcatgccattcagttccaagtgttcttcatcttagcactgtttaacgattggcaagctgaataaatgcattttttaatgattcattcgctgtctctttaaaatacagataattgttttgatttccttgattttgttgtgtgattagaacttttggctgcttttgctggaagccaaagaaatagagatgccctccagctggtgtagcatggtcgatgtccgaatagattgccacaatctgaaaatcggcttgtccctcaccattttctgaccactccaccgagacgggcgtttgattaatgacggttgtccatttaccaccaaaaatatcttgaggtacttggagaccatagtaattcgcttgcacatggtcgtcatagcttcgatattgctgccccatttcttgtccccaactctgcataaacgtcgcaagctctgcagacttggaagcatcccacaaaacgtgtgtcaccggttgacttgcttgtgcagtattcgtggaagcttgtggttgtgcgctttgctcatttgacgattgttgttcagatgattcagtggtcctgcttttagacgcttcggtactcgtagcgttagctgttttggttgaaattgattgagacgtgcttgactccgttgtcacgactttttctgtagaagatgtttcctctgttttatttgcggaacagccagccaaaaaaagcagtagacccatcgttgttactagcattttttttcatttattaaaccacccttaaggagtattcagtgtacatatagtagcagaccatatactaaatgcttactaaatttttgcgaagttttctcacaacttcctcatacatgagattgataaataacattacatggcattggtatggatttagaactgcgaaggttacttttaggaccataaaaataaaaaaacagtttagtgtagttgttttgaaaacattgaatcctttgcgcttttcttcgcaagtttgcttaaatatttcaactaatgacaaaatgctcgtttgttccctaagagttgcggttcgccttttttgatgcctttggtcgactagctatttttcccagctttgcaataaaatagtccaaccatcgaatcaagatgattggaccttttgacgcaagttgcctttccaaacaactttgctctcaattttttttgatgtttaatccttaattattttctttaaccaaagaagctccattagtcgcaatcacctgtttgtaccagtaaaagctatcctttttaaaccgatcataggttccgttcccttcatcatccgcatccacatagataaatccatatcgttttgacatttgagaagtcgatgcacttactaagtcaatacatccccacgtagtataacccattacttcaacgccttttctgatggcttcattgaccgctttaaaatggtcttcaaaatactttatgcgataatcatcatgcacttttccatcttcaaacgcatcaaaagcaccaatcccgctctcaacaatgaacagaggcattctataacgatcgtacatgtcgattaatgcaattttcaatcctgttggatctacttgccaaccccaatcacttgtatcaagataaggattcttcacactggtgactaaatttccgccaactttttcccgatcttcttcatcttctgttttaatcatagacatataataactaaaagagacaaaatccactgtgtgttgctgaatgatctcctcatccccttccaccatttcaatggaaaaattgttctcttgccagtaatttttgacaaaagtcggatacgttccaaaaacctgcacatcagaaaaaaagtagttctcccgattatgttgttgggctagcatcacgtccactggatttgaggttaacggataagctaaagctcttgtaaccatgcaccccacctgcgcattaggaatgatttgatgggcatatttagtcgctagggaactagctacaaactgatgatgtagcgcttgataaatggcctcttcagcttctttttttgttttgtacttttcttccaccactcccatcgtagtgaaggggtgtctaaagacgctatcgatttcattgaaagtcagccaatagtttacatactttccgaaatgttcaaagcaagttttgctaaatcgtacaaacatgtcgatcacttctcgggaaacccagccgtcatattcattgactaaatataatggcatttcataatgagacaatgtgactagaggttcaatcccattcttcttcatctctttaaatatgcttacgtaaaaatcgattccagcttgattgggttcactttcaatcccattggggtataatcttgtccatgcaatagatacccttaagcatttcagtcccatttctttaattaatgccaggtcttctttgtaacgatgataaaaatcgattcctcgtcttttcggaaataacttatcgttttttgactgcatggcttcctcgatttgttcaggagacacgtgccattgactgatataatctgtcctatctacatcaggtttgtacattgcgacatctgctaacgacatcccttttccatcaacgttccaagccccttctacttgattcgccgcaattgctccgccccaaagaaagttcttgggaaaatagcttttattcattcgattacctctttcagattgttgtttttatgctattatttctgtttgtatcgtttttttgccagtgaaagtttggatgattttacccttagagtcgataatgtctacctcatcaagatcatccaaattggttactacaaggatcgtggttggatcatagccttcagactggatgccttcaatatccacacttccgattctttgccccttttggatgtcatcgcctgctttaacagctaaatcaaaatagttgccgtttaattcaacggtattgatgccaatatgaatcaatacttctacaccagatgttgactttaatccaatcgcatgttttgtaggaaaaaccagttcgacctttccactaaatggtgctttaattacgccatcagttggtattgcagcaaatccgtcacccatcgttttttctgaaaacactggatcgttgactttttctaactcaatcacttccccatccaatggtaaactgattgtattgacttgaccttctgtttcttcattacttgatgaagattcttctcccagtccaaaagcaaaagttaaaattgctgacaggaagaaagcaagagcgattccgatgaggtaataaacaaaggtatcacccaaaaaggctggtaacgttgttaatgctggaaaaacatagacaatcgcctttgtctgcattgctcccatgaaagctccagcaattccacctgcgattgtttgggcaatcaatggttttttatattttaccgacaagccatagacgatgggttcagttatcccaccaagtaaagctggtacaatcgcagatagcgagagcactttaaacatttttatctttgcttcttaaaaatacgcctaacgccacacctgcacttgcaaaagtggcagccgcaaccattggtcgaataacgtcataaccatagactgcaagattattgatcatgattggcacaacaccccaatgaatgccaatcattaccaagaaagtccatcctgccccaataatcaaaccagccagtaacccactgcggtcactgataaagttcatagcgcttccaatcccatcccctaatgtaacgccgattggtccaacaactaacacagttagcggaaccataataagaagggcaaccattggcaacaaaaaaatttctaaactctttggaatcattcgctttagcagcgtttctaactttgaatagaggtaaatggaaataatcgcaggaatgacagttccagaataccctattaaaattgctggaatacctaagaaatcaaccgtcacaccattttctgtgactaatgctgtgaaattaggctctaaaagtgctgctacaattgctaatgaaataaattgatttgttctaaacactctggccgcactaaaagccaaaaataacggtaagaagaaaaatacactattgccggctgctgaaagaatcttataggtacttccatctgctgacataaaatgataggtcgttaaaaccactaacaaggctttaatcattcctgccccagctaaaggcataataatcggattaaaaatggaagacagtgtattaaagaagcggatgaagatatttccagatcggtcatcatctaatgcttccgactcgtctgatcccaaggcgcttttaatgtcatagttagccatgatcgttttatagacatcttccacttcatttccaataacgacttggtactgattatttgcttcgacgacggacaagacaccggaaatcttcttaatttcatcggtatttttttgtgcaatactttcatcttttaacttgaatctcaatctagtgatacagtgataaagactaatgatattctctgttccaccaacataatcaataatacttttggaaagagcactataatttttccccattgttacaactcctatcaattttgtttatgtttgttataatacatgtgtaatatacaattttttcaacatattaaataaaaatttcgttttttggaaactctttcacagataggagctagtatttatgggacccttaattattagactattgactgttcttaacaatgaaacaacttcttctacctactaccatatcgctcagacacttttgaataactatagcattatcgataaatcaagtatctctgatatagctactttatgcactgtctctaaatcaaccatttcaaaatttgctcgttccatcggatttgaagattattatgaattaaaaaaatcctcaacctttgctgaaaataaataccatttcgacttaaattacatttcaaatattatcaatccaattgaaaaaaatggttatgatgattatttagatgccatcattaaagatattagtgcgttcaaacagcaaagcaacatgagaagtattgatgagttagcaaaatgtctgactacctataataaagtaggtgcttttggactgctattttccgaatcagcagccattgattttcaatacaaattggcttatgcgggaaagtttattattacttatcaaagtgatctcaaacaaatcgaattcatagaacaagccgatgaagagacactattgattattttttctaactctggcggttttttacagcgacaacaacttagagatgatataccctacagaaatgtatttgaaaacacaaaagccaagattttcgtaatcacagcaaatgaagaggttcgtaactatcgtttcgttcatgatgttattcttttccctcatgagactatttttcaaacccattcttttatctatcaaatcattatggatatcatcgttagtaaatatcgacagtatcttgaacctccaacaatctctcacaaacaataataacctacgaatgaaattgacaaaagaactgctagtgatgagaaacctatcactagcagttctttttgaggttttattttttaattaggaagaagtagtcatctaccattattagcaaatatgccggcaatacttttccaatgtatttcttctcaattgcaacttccatctaactattgtctataaggttttctttcttagaaaaatcaattatcagcatttttgttatttaagttatcccgtcatatcattttagtgttgggcttttcttgaaacacttttctaatgattaatatatgcaattgcacttccactaccaaatttaatctccggcaacgatcgtttgtataaattcagctctcttaacgtatcatctctttgagagagtgcacgaaacgcatagcgtgtccgtccgttttcgtttttcttcgatcctgaatattgagaggagactttatatgcagcaacaaccgcattatctgctccagtattaatcgctataatgtagcgaatccgatgaattttatcacgaccaattacccaattacctagcgtacgagattttaaattatgatcatcacgaaatttgtcgtcaatcggatattcatctgactcatctttacaaagttcaaaagcatctctcacttttactgctaagaccaactcatccgttgctatttgatttacagatatgggttgaaatccatatcgctcttctacctcttccactagcattggcttagaaccatgtccttttactaaattcgtcaaagagagtccttgaatcagttgagcataattaatcaacgcattttcactagcgtaagcttcattctcagttaatccatagctaagtatataactcaatggttgcagattcattccgtttatttcttggatagtttttatttttaatgttctagctgattcatcttcttcaaaataatcagattgacttaacatacttagagccgcttgacgatgtgcaaaaatacggttacctttgcctttcccaatataaaaagtctggttgtttctaggatcaaccaaacaataaacatagtaaggatgttgctcatctttttgcaacgcagctaaagtagatgcagaaaaatggttaagttcactcatttgttactcctctgttttactattttttctttcgtggagaaaacaccctcacttatgataaggcgcgcctgtattgatgcgaaaagcacgatagatttgttcgactagaatcagtttcatcaactgatggggataggtcattttgccgaaagagatttgggtgttgctgcgctgcatcacttcttggctgagacctaaggagccgccgattacgaagactagttggcttttgctttggattcctaattgctcgatctgctgggcaaaagcttcactggtgggatttttgccttcaatcgctaatgcaaagacgtattcctggtctttgatctttgccaagattttcttaccttctttttctttcacttgaagcatttcagcttcactcatactttctggagctttttcatcaggaacttccacgaattggattttacaataagcgcctaatcgtttcacgtattcattgatgccttgaatcagatatttctcttttaatttgcctactgtgacgattttaatattcatgaccactcaccttccgctatcattataatggaatttcttttcagaatatatgtcgcgtaccaattttttcttctatagtaccattgataccacgaatcgtttcaagtgactcttttcttactaaaaaaatgattggtagtctaaaaaaagaaatttcattgttttggtctaaatcctccctatcttcttcatatttttttcaaaatctcttagtagactattgtcagaaagaaagaatataataaatacatacaaacaattcaatagggggaataacaaatggtacgaaaaaatgtgacaccaggaagaaaaccttcttccggcttattaaaaaaattaggtattggcattcttggcggagtagttggtggtttgttgaccttcggcggactttatctggcgatgggctcttctttgacttcacctgtaacgaccgcaaccagcggtgttcaagataacaatggacaaacgaaagtctccaatgttaaatatgacgtcaacagcgatgtaacaaaagcagtcgaaaaagtgcaaggagcagtcgtttcgatcatcaacttgcaacaaaataatgcgaatggcctcgaagggttatttggctctggtcagcaaggtggtcaagaatcagggactgagaattcaggcgatgacagttcactagaagcttcttctgaaggaagtggcgtgatttataaagtagatggtgacaaagcgtatatcgttacgaataaccacgtagtagaaggacaagatggtttggaagtcgttctctctgatggcacaaaagtcaaagctgaattagtcggaacagacgcttacactgaccttgctgttttacgcatctcttctgataaagtagacacggttgcttctttcggcgattctgattcactaaaagttggcgaaccagcaattgcgattggttctccattaggatctagctttgcaaattctgtaacgcaagggattgtttcttctctgaatcgtcaagtaacgaatcaaaatgaatctggtgaagcagtcagcatcaatgcgattcaaacagatgcagcgatcaacccaggaaactctggtggtccactgatcaacgttgaaggacaagtgatcggaatcaactctagcaagatcgccagcacttctgaatcaacatcaagtgtcagcgtagaaggaatgggcttcgcgatcccaagtaacgacgttgtcgatattatcaaccaattagaaaaagacggcaaagttgttcgtccagcattgggtattcgaacaatcaacttaagctcaatcacttcgcaacaacaagaacaaatcttgaaagtaccatcttctgtcactgacggagtagtcgtatactcagtaaataacgcgacaccagctgaacaagcaggattgaaacaatacgatgtcatcacgaaaatcgatgataccgacatcagcacaaccacagatctacaatctgcactgtacaagcacaaagtcggtgatacgatcacagtgacgttctaccgcggcaaagaagaaaaaacagccaaagtcgttctatctgtagatacttcgatcaatgaacaatcgactgacagcagcaactaaattcaagtcaaaaaaagatctgccacacaaacaggacgtggcagatcttttttattattttccaactggaaaagcttcaccaacaacggcatcttgtggtaattcaagaattccttttttcaatggtgcatttgctaagtgcagttcacgagcagaacagatcatgccgtagctatcgacgccacgaagcgttcctggccagatcaataacccatccggcatcattgcccctggtttagcaacaacgactttcaatcctttgcgaatattggcagcaccacaaacgatttgcaggacctcgccttctccgacttctgtttccgttacaaataaatgatcactatctggatgtggttcacatgttttgacataacccacaacgattttcggctctaaatcaattgccaattgctccgtaaagccagcttctgtgatcaatcggttcaaagtttccacttgttgtttcgtcaaaactacttgtccgtttccttcaatggcaactgtatcagaaatgtgaaagaagttccaacctacgatcgtaccttcttcatttttgatttgagcgacatttccttttcgtacagccgtttgttcaagccctttatcatctgctgtgatcacgatcaaagtatcgcccacatattctttgttgtatgaaaaaatcacttgtcttcctcctcttacttattccgcccataatcttaacaaatttttgtctgttcgtcatgggaattttctcagtttacaatcgctgcacttcccaatccataaaaaaactgcgacagaaatcagaccaacaggcagctagtgaatgaaaaagcactcgcttgctcttttttcctgtctctgtatcttctgtcacagctttgtcttttgcttattcttcgctaggagagacaaccaacacatcacatttcgcttcgcgaataatataactcgctacactcccggtgataaatcgctcaactgcattcagtccggattggcctaccatgatcaaatcaatcccatatttttctggtaactgtttggccattgcttctttcgcagagccgtaagcaatgatcccttcgatcaaatcaaaattaacggatttaccatattgtttacaggattcgattaattcttgggcagtatccttttcctgctcaatgatcgttgtatctaaaggagcatatcccatcatcgtggggatctgctgatcgatgatattcgctacatagactttcccctgattgcgtcgtgccacttcaactgcttttttgaacgcttcattggcttggtcggagccatcgacacctactaaaatattttgatatctttgcccactcatgtttttcacctcgaaagtttaatttagacttgataagaaagattcgatttctgcttttgtttttcgatctttgttgactaaacgaccaagttctttgccgtcttcgatcactacaagacttggaattccaaagatattccattccacagccacatccatataagcatcacgatcaacttcaacaaattgaaattcagggaaatctgcttcgatctccggcaattgcggtttaatataacggcaatccccacaccagtctgctgtaaaaaagaagacattctttcctttttcgacatatgttgccaattcttctaaattttttggaacaatcacacgctcaccactttcttttctctaatcaaattatacaccttttaaaacagggaaccaactcacaagcaaaagagctgtgaacacgcccatgctagtcactgaaaacagcaccctagttgtcccatttcctgattatcgtaaacagttacaataacagatcaaaaattgaaccaaataggtctgatctagcgttgagtcgtatcacagctcttaatttttattttccttctacaattgtagcaactgttgatttatccaaacctttcaagacttggatcaccatttctctcgcagcatcaaagtcagcgatgctgaatagtgtttgatgggtatggatataacgtcctggtacaccaatcacagaacttggaattccttcattggccatatgagctgcaccagcatccgtaccgcctttagacacaaagtattggtaagggatattgtttgtttctgctgtgtccagcaagaattctttcatccgaggcaacatgatcattcctggatcatagatacgcatcagtgtaccttcacctaaatgcccaaaagtcccattcttcgtcactgtatcatcagctggtgaacagtcaacagcgaagaatagatctggttggaatttcgtgacagaaggttttgaaccacgtaagccaacttcttcttgcacattggcaccagcaatcaatgtatgacccagttgttcttctttcaatgcttccaatgcttctaatacaaccgtacagccataacgattatcccaagcttttgaaataatgtttttgccattcgctgtcttgattgtttctacttgaggtacgatggtgtcacctggtcgtacgccaaaactttccgcttcttctttagaatcaaaaccagcatcgaacagaatgtccgttacttctactgctttttgtccagctgttccacgtagtaaatgtgggggcactgatgaagaaatacatggatagttgcctttcgcagtttttaaagtgaagcgttgtgctgaaacgacataagggttccaaccgccaagaggtgtcactttaaataacccgcgttcggtgatttgtgtcaacatgaatccaacttcgtccatatgagcagctagcatcacgcgtggtgcatctgcatctgaatgatgacgtaatccgaagatcccgccaagtccatcttgttggatttcgtccactaatggagtcatcgcttcccgcatataggcccgaacatcctgttcaaatccactagttccttgcaattctgttaattctttgattcgttgaaacgttttttcttccatacttttttcggcttgaatcgaaacaagccttccctcctcttgcaaatctatatttattataacgcaaattactcattctggttcttttcttatagaaaaattctaaactatggtaaaataatctaaacagacaaaaggatttccgtttattccttaacaggataggagaagtcttcaaggaggcacaacatttatgatcaatgaacgtccattcaattattttaaaaacggcctggccatcggcgtgggtgtcggttttgcaggcgggatcttctcgacattatggatgaagaaaaaacaatcgatgaatgcagatgacgtcctcgatcaaatcaaagcagcatttttaaaagaaggtccgatcgaaggttcctggatcaattttgagaagcaaccccttcgtaaatttgcagtgacatctcaaggatataccggcggtattactcggaccgaagacggacaactgatcacttacgaatttttagcagatgcgaaaacaggaactgttttggatattcaacgatcgatcattgattaatacgcattgctatacaacagacgctcaatgattcaaactcataaaatagtcgaacatcgctagatgatttttcttgtcgttctttatgaacaacagtgatcatcttgagttgtccgactattttttagttgcagcaatctttttgggacgtttatttgcatgaagcaacgttgctaagtctagtaataaaacattggctaacacaggattggctttctcgcgatacgctgcggcgccactttcaaacaatactgctagacgatcttctaaaacaacgatttgttccaaatacggtggaaatttgattcgttttaggatccggctaggagagtcccgctcggacactaagagttccgaggtataaggaccataagaacgactggctaagagataatggccataaaaagccacaccttgaatcttatcagatgtttttctgctcattgtcacggttggttggattttgtctttgcggcgaattgctgttttcatttcagctatcgtcggcaatagatagaaagtcaactgtccttcaccttttagtgtgaagttgccagataccagttgatcattgttttgagtcaaatacgatgcttgtggaatctctaagagatcagttgtcagccaataagcgattggctgtcccgtctcttcagatgtatctgctaagatatcgatcaaacgtaaagcggctactcgtccagtagcagatcctgtgattgtcaaccataaaagttcccgttttgtatcatatactaagccccctacatgtggccgtttaggtaaaatcagcagtttgatcggctgtcctgtttctctatccagtacatgaataatagaatgatgctgatggtcatagcagtaggcagaaataaacacaaaatcttgagaaaaagccaacccttgcggcgtcatccattgacaaacctcattttcgccggtttccggcaccaccattcttgtttctgttaatccaggaatgttatattgttttgcttcagccttttcccaagctgcttgaacaataggataccgttttaactttttttcaatatcctgatgtatccgttgctgcttccaatgcttaaactttaggacatagtaaacaaggaggccaatgaccagcaacactaaaatcattattgctacccgctgagtcatttgtttgcctccttgttctattcgatcaatcgtacatataccgctattaattacagtatctacatgtttcttttactagcgtttctttataggatctttcataatctcatttatagtaacattaagaatcccttattctactatagtcacttccacatcaatattgcctcttgttgctttagagtatgggcaaaatgcgtgggcttcttctgcgattttctctgcttggtccttctcaagtcctggcaaagaaacttctaaaacaaccccgatttggtagcccccatcttctaattgaaataaagatacccgtgctttgacttcagaatcagactcaagattattttcttccagcatgtgttgaaccgcgccgttgaagcaagatgcgtatccagccgcaaatagttgctccggatttgtcccttcactatggattcctgggcggtcgatcttcatgtgcatacttccgtttggtgcctcgacctcgccatcacggcctccacgattgatcattgctgtttcgtacatttttttcattgagatcatcctttctttcgtctttctatattaagtgtaacgagtattttttaatctgacaaaggtaatgcttgcattcgacgacatcagttagacaacatcgatgatcagtgatagaagcagtttgtctatacaaaaaaagaagcagcgaaaagctgctccttaagataataggtaaaattgctgatatatttgacgattaacctcttgaacgtcccaagaaaaatgatactacagcaacaacgatgatcgcaccaatgatagaaggaatcaaagccattcctgctaattgaggaccccagctacctaacaatgcttgtccaattgctgaaccaactaaacctgcaacgatgttagcgatccatcccattgatccacctttatttgtaattgctccggcaatcaaaccgataatagctcctacgattaatacccataaccaatgcataattttctccttctttctgtgaaatatttattacacatattatgttacgcttcttcttaaaaatacacaaaaattttgctcttaaaaaaacaaaaaaaatttaaaacgttgttatattaaggataaatcaacttttttggaatcgttaacactcactgcaagaggtcaaaaaaactgccgcagctctttgaaatcgttttgatcagcaaaaagttattttctgataaagggtacctagactatgtacgattttctttcattgtctgctttcaaccgtcatcttccctatgaataaaagcaatcaaagaaaccagattgtcgtacacacctcattcactacatccttctgatgaaacatcaaaacaattggcattcctttgattctgccttttgtatttgaaacctgcttcccctcactatgtaaaaggattatgagaaaaagcagcgatagaagtgagcgtatgcaatagcgagtaaagtaaaaaataaattgttcggattgtaccccggcctttcttcttaatatttttcatttctcgcttctcccctctgcttattggacagtcttcgcgattgtgaagtcacgaaaaaaagcaactttgcccagcgttcaatgctagacaaagttgcttttttattttgtttttgaaaagtctttctttgaaagatagacagcagtaaggatgcctactaagacagctaacccaaagactagaatcgttcctatcgtgttatccttcccaggcagtccgccagtgttgatcccccaaagtccagcaattaatgatggcactgcaaccactaatgctgctgaatctaaatatttcatcaaatggttcaaattattgtccatcatatccgagaatagaccaccgatggtttccaataaatcgcgatagatcgtgacaagcttgttggcaaatttctgtcgcagtttaatgtcgtaaactaacgattcattatctagtttgtctaaaaactcttttcgttccatcaagtgattcactgtaagattctgatctttcaatgtgtgatccaaataaaccatatctcgttctgtgtctgccagattaaatagttcattattttcggttgttttacgggcagccgcatccaattggtcgatttgctttttaatctctttcaacccattgataaagtgggtatagatcattaatgtggcaaaagcaatgatatcctcaaaatgtcgaagctcatttccatgtttctcgatcaatcgctcaacgagattcgattctctagagacataggtgatcatcaatcctttggaaagaataaatgtgacaggttcaaggcgtttttcaatgcgttcttgatgatttgaagaaagatcgatcaatgtataaagaaacggattgtttaatttagtgtctcgtaaatgttctaatcgagaaacttcctctggttcatcggagccaataaaaatatcttccggtaaatcaaaaagtgtcagcagctcttttttttcttcttcatttccatgtttgactaccaaccaattatagtcttcttcggatgattctctgatttggttctgttcgattttatagtacgaatacattttgcctctctcctttaactccttcacttctcttcaactatctaatggcgactgctttttgtcaagaaaaagcgctatttcaacggtttttattaatacggaaataaagcaagcgtttgattagaccattctaaataaacgtgagagaatatttttgggcccaataaaaatcattttagaggaggacaactatatttctacatcagaaagaactacagttcgaagcaaaaccagacaaaccaaatccattaattgcgaagtatcttcaagaattgatcggtggccagtatggcgaaatgagtgtagcaatgcagtatctcttccaaggttggagctgccgtggagaagaaaagtacaaagatatgttgatggacattgcgacagaagaaattggacacgttgaaatgcttgctacaatggttgctcgtttattagaaggtgcaccggtagaagatcaagaagccgcaatgaaaaaagacccagcaattggcgcaattatctctggaatgaatccacaacatgcgatcgttgctggcttaggaccacgtccagctgacagtgtcggtaatccatggagtggcgcttacatcattgccagcggtaatttactggcagacttccgtgccaatttaaatgcagaatcacaaggacgattacaagtcgctcgaatctatgaaatgattgatgaccgtggagttaaagacctcttatccgtgctattagctcgggacagctatcaccaaaacctttgggcacaagctgtcaaagaacttgaagaaaaagagggtacaatcttagtaccgagcactttccctcgtaatgaagaacggttagacatcgcctatgacttttacaatttctctgaaggagatcaaagtaaagaaggctcttgggcaaaaggaaaagcacttgatggcgaaggtgaataccaatggctttctacacctaaagttgaaggcaaagcgccaaaactagatcctgtcacaccaaaaatgtatggcacgccacctgaaaaataaattgatcgaaacgaataaaaagagcaatgattccattcacaagaaatcattgctcttttcttgtcttattgagcaagttggttaccttaaagctaaaaaagcgttagagtagaatgtataagaaaaaggaggaatcattatatgaaagcacctttacttacactaaatgacggcaatatgcgcccagccgtgggcatcggtacctatcaaattcgcggtggcgaaggcttaagccagttgcaagcagcgattgcagatggctatcgtttgattgattcgtcaacgaactatgacaatgaaggaatcgtcggtaaagcgattcgccgatccggtgtccctcgttctgagttttatatcacctcaaaattaccaggaaaatatcatggatatgatgatgcactgaccagtattcaagaatcgctggcgcgcatgggattagattactttgacgcctttttgatccactggccactgcctaaacgcggcaagtacattgaagcgtggcaggcgttagtgactgcgcaaaaattaggtttgattcgttctattggtgtatctaactttgaacctgaacatttagatgccattattgaggcaactggtgtcactccagccatcaatcaaatcgagatccatccttactgggtccaagaacaaatggtagcagaaaacagaaaacgtgggatcattactgaagcatggagtccattaggccgcggcagcgcggcgctcaaagaatccatcatcactgatctaacaaataaatatcaaaaatctgcgggtcaagtcatcttacgctggcacgtcgatcgcgggattctaccactaccaaaatcccgaaacctgagccatcagcgagaaaacttagctatttttgactttgaactgactgaagaagaaatcaatgcaatcaatcgcttgaacaaagaagatggacgtattgaaggtcaagatccgaatgaatatgaagaatttgagtaaagtgagacagcacaaagctcctgagggatttcataggctcacatcaattataggaattggaatggtcacaaaaaaagaactgcgagatgacttgccccaattgaattccttagatctactagcagcaaggctctactgaagtcttgctgctattttatgagaagtaaaaacttctgacacgatcagttttcatttggattatgcttttctcacagttctttttctgagttaaaacttctgtacaatcagcgttacaactgataatgaatggcttctttgtattgttcaaacaatgattggttcaattcatcgccgccatccatatttgcggaataaaagatgggcggataatcgattcctgcttgtttcaattgttggcaaacttcgacgataatggtattaaggatcgtagcgccaatcaccgttgaagtaggccccactttttgatccatccccttaatctgacaacctgcatcaccaatttctccatgattatcgattacaagatcagcgacttcaaacagacgaaggcccgaagaatggcggctagtgactgattgcgaatacgttttgtttgttaaagcgataattttgacgcctttttcttttgccgctagtgctaaatcgattatgacaggattacgacctgaaactgagtgtaaaatcagcacgtctccttctttgaacggctggatttccgctaatgcggtgccgtagccttctagtcgttccattttgctagtaaaggtgatgggactgcgatccaacatcagttctcgtccaaagatcgcattgatcgtcatcatccctcccgcgcgatagtacatttcttctgccaagatccccgcatgactagccccaaaaatataaattgaatgcttttctagatttgctgtagtcaagagacgaattgcctcatcgattgcatgctgttcctttttttcaacggtttctagtaatgcatgaattttatcaacatattgatacatattaaattcccccaaatagactgccgagaccacgaccaatgattccccaaagtgataagtcattgccaccaaagatcagaatccagttttgaatcgttgtgctgaatagaacggcagatacaccaactaacaagaccatcacaaatgatgcggcaatggtaccaatgactgcgccacgcaagccgccttgtccttctccaataactgctgcgccgccacattcaaagaaactggtgataactaatggtacgatcaagattccaaaaacattcgtcgtattgacaatgatcacaaggatcgttgaggtgatcatagctacgataaaaccaataatcacggcattcggacgataattgaataggatcggtacatcaaaagctggtttggctccagggacgactttttcagcaatcccttggaaagctggaataatttggttgatcaataggcggaccccataaagcatgatcaagagtcctgcgccaaagttcaagcctgcttgaacagcaaacatgaccagattcccaccttctgggacaagaactggtgcgataattcctacaacaatattcatcaaaaacatcaccaaggcacctgtaatggaaatctcacggaaaaaggacaggttttctggcacttttaaatcttctgtcgatttttctttgtttcctactcgttttgccacgaagccggacaccatcgataagatccctgtaggatgtccaatcaagaacgaatcatcgccagtggcatcccaaacatatttccgcatgatccaaggcataaatgaccaataacaagcagataaaacagctcctaaaatcaataatggaatccccgacattccaccttcaaccccaccagcaacgatcacaaatgggaaccaccataacatatgacccgtcaagaaaatcgttttaactggtgtaaaacgagcaatcaataagtgcaagatcaatccaaaaaacatagctaacccaacagttcccccgtattctgctgtgaaggtcacatcagaaagaccatcggctacttgaacccccaactgtgtctgaaccgctgtgttgattggtgcgatcgttcccgtcagcatattgacccctgcggtcaatgctaccatcccaaaggctgctgtcaacgagcctttcaccacttcggcaaaaggttttcgttgcacgatcaacccgatcattgcaatcagtccgagcaatactggcggattctttaaaatatgatctgtgacaaaactcatgattatccctctctttcagctaaaaacttttccatttgcattttgacttcagcgacatccatatattttttgatgggatagacaggtgctttgacggaagcttgcaaatcattcaataattcgtggcttgtaaaataaacatctgcaggagttgcttttgcagtagacaaatccgtattctcagcagtcgccttcagccccagctccttaatcaccttatcgatcgtcatctttaacaccattgaacttccaacaccaaatccacacacagctaaaattttcatcttcttttcctcctattggaataattggcaaatctgttctttgtcaccattcaaaataagttgatacttttcctgatccataaacacttccatgatttcctgcaaactttccaaatgactttgattgtcttttgcagctaaaacaaggaaaatacggaccgacttgccagctaaatcgatttcgtttttagtcactagcaaactcatcccttgatgaaagacaccttcccccggacgagcatgcatcaatgcaaagtaatcagccaataccatatacgggccattctcctcaacgctatggatcatattagcgacatattgttgatcgatggctttttcatttaatagcggctgactcgccaattgaactgcttcttgccaagtgaggatttgattcgtggtctcgatatgatcctcaggcagtaatttttttaaattgatcatgattttacctccaacatttttgaaatgaaccattctttgtcttcgatcccttgcatgatcaacttcatgacaggttctacttcttgggcctcatcttctcgtatcattagtaacacgatgatatcgactttttggttgccccaatcaacaggacgatccaaaatcaatacagaaaaggtcgtttttgaaacaaactcaggattgccatgaggtatggcaaaaccgttatctaaataggtcgactgcaatgcttctcgttctaagacggaacgctgaaagtccgtacgctgattttccgacgaaaagtcattttgactgatcagaaaatccagtgcttgttctttggtctcaaatcgttcaaaataaatcttcggtgcaatcaacatccgtgtatcttgcaggattttcaccttatccgcaatcggttcattatcaataatcaaatcgatatagtgattcatgatccgcttcatgtctcgattggtcaccatcggcgagatgcggacgactggtttggaaacatcaggtaaatcgatcgtggaaataatgaaatcgatggcagaaatatccatctctttgagcttagcgacagaagcggtttcaatactatcgacattaggcaatattcgacgaatctttgcagaaataaatgaactggtgccaacaccgttcggacaaacaaagacgattttattcaattgccgcatccgttctactgcagcttgaaagtgaatcgaaacaaacccgatttcatcctcagatattccaatatggtaggcctttagaaagtcgttcaaagagaaccaaacgaccccatacaacgccggataatgctgtttgatctcatctagcaatggattgactacagtagtttgggcctcaatgcgtaaaaacagctggtacaaatgaatcgtcaaatcttcttctaagcgactatcctgtgtcaaatcgatctggatgccttcactgactttctgaatcagatttctgactttccctcgaaaagagaacggaatcgattcgttcttcataaaaaaacgtaagccactacctacaatgagataggttaggtactgaacttctttcgatgaaaaatggtagatttcttgttcttcaatttctttcaacaattcataaatcaacggatacttgtcaaattccaaaaacaattttccaaattggcgcttctcttctatatccagctgatttgcctggttcgagcgctcgacaatcagcaagatcgaaacaacgatgctttggatgtagctttctgggatctccatttgcttttcggtgatcgaatggcgaaaagccgcatttatcttttcaaataatgacacatttgtcagaacagaaagattctccccatgctccatagtaaggagaatgaatcgcttcaacattcgttggatttgtgactcgcttccttgaaaataagtgcctgaattatcaaaacgcaacagtaaattttctttgacaaacagtgtttttagataagcgatatccttggcgatactgctcctagaaacataatactcatcagaaagttgctggtaactcaagtgctccccattgatcagccgcttaaaaatttgcatgcgtcggtcttcgatcaaagaataattgtttttcatttgctcaccctctacctttattctagtgataccttaacaaatatgaagaccaattgttagattaaaaaatgattaaaaggtgtgcacaccctttcccttgatagcaatatcggtcgtttgttccgcaaaatcgcttcaagcaagccaaacttttctcatcttcctcgttttctcttataataaatgtaaacagtcaaatgaggaggaaacaaaatgaaatggcgtgggggtagacaaagttccaatgtggaagaccgctctggtcgttccgcaggttcaggaggaaaaataatggccggcggtggtatcggtacgattgttatcgcagtcctcttttttctattcagtgggggtgatttaaactccgtcacagatattttaggaggcggacaagccgctaattatcaaacagaaaatgtggcttcagacgagtatacagaggaaaaagaattctccgctgtcgtcttcggccatttggaagattattggaatggtgtttttgaagcagaacagactacgtatcaagatcctaaactggttttatttacaggaagtgttcaatcggcttgtgggaatgcaacttctcaagttggtcccttttattgccctgccgatcaaaatgtttatctggatctcagctttgcaacagaactttctcaaaagtatggggccagcggagattttgccatggcctatgtcattgctcatgaagttggtcatcacgtacaaaacgaacttggtattacacagcaactcgataagatccgccaacaggtttctgaaaaagaatacaatcaatatagtgttcgtttggaactacaagcggattatttagccggtacatttgccaagtatctacaaggaaaaacttataacggccaaccgattttagaagctggtgatatcgaagaggctatcacagctgctaatgccattggtgatgatacgttacaaaaggaataccaaggatatgtcgtaccagatagttttactcatgggacttcaaaacaacgagttgaatggttcaaccgggggttcaaatatggtgatttggagcatggagacaccttcaatgaaaaaaaccttgatttggtctacggatcgtaacaaaaacgttcctttttagtcactcttttttcacatttgggcggtatagtttattcataccaacaaaccctaactttttcattttactccttgcctgccagtccccgctggcaggcccttttttttcatggtgctattttagtttttttttaacctttggcctgtttttttctttaaaacgctaagggttgatcacaattttttcatattttccggttactatataaataacccaacaaacaacccaactttttcattttttactccttgtctgtcagtccccgctgacagacttattttttttcttgccaaaattctcaaaatgcgctaaggttatttatgcgcggaagtggcggaatggcagacgcgcacgcttcaggcgcgtgtgagtatatctcgtgtgggttcaactcccatcttccgcattttgagcagatcatcttggatgatctgctcttttttatgtgtttcttttgtctaaataaagaaaaaagcttaagctagaagtatatcaataggaaaaagacaggaggaaatccaatgaaagaagtaccaacagcgaaaatcaaattaactgaggtcaaagaactctttgatgctggttatgaaatcttaggagaattacggtctgaggtgaatgccccagtcgttagagctaaatttctgaatcaagaagtgattgccatttatggaaaagaagcagcaaaaattttttatgatccacgaaactttaaacgtgaaggagcaatgcctaaactcgtccgttcaaccttgttaggggaagagggggttcaaactttagacggggaacaacatcaccatcggaaaaactactttatggacttgatgacacctgagagaatgaccgattaccatgatttgttggaacgaaacctttctcatgaactggataaacaatccggtacctttgagcttttttcactcacaaaaaatgttctattcaaaacgatttgtgaatggtcaggaatcaatctagcaccactgtctcaatcagagatcagtgagttagctgattatcaagttgctatgttcagcgggactgtcacctcccctgtcgcccatttaagaggcgtcgaagatcgtaaaaaatctgagaaatgggctcaaggattgattgaagaagctcgtcaacatcctgttgctggcaaagaatcattagcactttatactttcgctactgccactgatcttgaaggtaatttactgccgatcgaagttgcagccgtcgatctgttaaatatcatccgccctacggttgctttaaccgtttggatcgctttgatgggacatgccctttttagtacaacgactatctaccaagcacttaaacaaaacttttcggagttacaggattcatttattcaagaattacgccgcttttatcctttctttccaatgatgcctgccattagcttgcaagatgttgtcgtcgatggttatctgatccctaaggacagctgggtcgtccaagatatttatggtacgaatcatgatccgagaacctttgatcagccagatgacttcaaagtggatcgctttgtcggacgtacacaagccatttcctatgaggaagaatatgaaatgatcgcacaaggaggcggtgatttccgcaaaatgcaccgctgtgctggtgaatggattaccttgcatacgttgcgcgtgttcagtgatttactggtcaaccactatcagtttgaagttcctgaacaagattggaagattccaatgaatcactttccaacctatccagaaagtaaagttctcttatttaaagaagctgcaatgaccacagaaaatgagtaactactgatcgttgttattaagtgcagctcacaaaaacgcagcccaagcaagcttagggctgcgttttttgcttacttctctacagatgccgtacggaaataaaaataggcaccgtatgcgggaaattggatatctttgatcgttgacctgatcatataatttgatgcactctgatatagaggaacttgagctgcatcttctgctaacagaattgattctgctgatttgtaatcttcaaatactttatctggatcattggcatccacggtacgtgcgttttctgtcaatgccgtatagtcctcgttgacatatccaccgtaattgtaagaagaaccttttttatataaattgaaataagagtccaagtcattgctgccagcaatccaaccagaaatcgacaactcatattgaccatctgctcgtgattgattcaaattcgttcgtggttgtttattgattgtaatcgtcaaaccaggcaaatgatcttgaagctgattttgcagatattcaccgattttttgtccatgatcatcatctgttaccaataaagtcagttcaattttgtcaccgatagctgattgtgcttggctccattctgcttgtgctttgttactatcgtattcattgtattccccgctataagtgcgaaaatcttcattggtattcggattggcataaagcccactgggaataaggccattcaatacgcttgctccatcgttcaacacatcattcacgagactctctttgtcaatcgccaaagcgatggctttacgaaggtggacatttgccaatggtttatttgcctgtttattaaaatctaaaaaatagttggcaatatccttttgagtgactaaggagtcattattttggtactgttgcacatagagtccgctgattttttgcagatccaactccccgctttcaaacaactggattccagtattctcctctttgatcgtggaacctttgattttatccaacttaactaccgcttgatcgtaatactcaggatttttggcaagcgtccattctgcaccggtctgttgccagtctttcagaatgaaaggtcccgtatagagcaagtcttcacttgttttcccatatgccgtccctttttcttcaacataagactgtctttgaggcgctaaccagccaatcgacaccaccgataaaaaagaaggttgcggctgttccaaatggacgacaaaggtcttttcatccggtgtttctaagccaatcgtcgcaatgtctgctttcccttcgcgaatatcttgactgttgacgacattgtctaaaagatacgcatttggccccatggttttaggatcgaccagtttcttccaagcataagcaaaatctgctgcttgcacttgctgcccatcactccatttggcttcttcctttagtttaaaggtatatgtcttgccatcttcactgatgactgcatcctccgccaaaccgggaactggctgactcttttcatcaaaacgatacaagccttcaaaaagatgctggataacggtaaacgtaactttatccgttgtttgcgtcgtatctaatgttgtcaactctgccggtaagctgactgaaatctcttgaacttctggatctgtctcctttgcggacgatccagtcgtgctacatcctgctaacaaaaaacttaaaatccctacaacaaccaaaccctttttcatttactctcctctttccttttcacttgcgagttgcaagcttgattaaataaaaaaatcctcgtccctttgctgatcatcattgatcaacaaagggacgaagacttcgtgttaccaccctttttcgtgtcatttttacaaataacacctcatcagtacgtatgcatactcggcaggataacggctgcgttccgtctaaccagcgtaaaccagttaaaagactctgagctcatcttcacttagcgttctgtcccctttctcaccaacccgggttctctttaaacagtcatcaaagctactcttctcatcgatgtcctatattctactgaattgataaaagtatactattcctcgtttttcaagtcaaacagtttttagaattttcaatcttttcaataatggcttcaagactttttggagggcaaatacttgccagcttagtgttttttttctaggataaagaaaagaaaccttgctcgaaaggatgaaatcaatgaaacttgctgaagcattattactacgaagagatcttgaatccaaactcactctgttacgagaagagattgccagtagtgccgtgatccaagaaggcgatacgttagaccgcagcatcgacgacttactgctggattatgaaacaacaaaccaagaatttgcccagttggtcattgcaatcaatcagcgaaatgcggtcgccaaaatcggtggacaagaaacgattgctgccgcattagagaaacgggaagctttaaggcgttcgcatgcgatgctaacggcaacattggaagcagccaaggttgctccacggatgggacgtaatgagattcgtatgatccgaacgatcgataccaagcaaatcaccgaccgtttgaatcaaaccgcaaaagccttacgtgaattagacgggcagattcaacaaacaaattggcttgttgatttataaaacagctgggtgggagtcaaaagcgagcacaaagcaggtacaggcttatatgtacaccaatggggtctggcagggaccagtttaatgactgctgttcagttacaagcgtacaacttatatttttcaattaacgaccacgtgctggtttgacaaggtgggtgcctctgtttatcttttgttacgcaaaaggtaaacagaggttttttgttcagcaagacctctttcaaaagaaaaagaccccctgatccgtttccaacataggaaaccagatcaaggaatctttgatcgtttagctagttactttcttttctgtctgcgatataccactactacaatgcctactagtaacaagcctactaacatccagctgacttgatacgtttcaccggtttttggcagttcgtttttcttcgtcggtgtttttgtattctgattttttgctggatcaggagctttttctggcgtgtagcggttagtaaaggttggctcgctaccataatctgctttcgcttccaatgttccgttttgatctttgacatttacggtcactggaatctctgcgtcatcataagtgattgtactgtcttgtccggctttttcccggatcgtatagttgtactcaccggctttgtcgtacggaatcgcatcgaagtaaactttccctgtgccgtcgttggtttggctttgaatcacttgtccctcttgatcgactaattcaaaggtgaactcccctgcgactagtgaacggccagtcaaaactttctcagcttccaacactacactgccggcttttggtgtgtaagtgttcgtgaagacggcgttgccttcataagtcgctgttgcttctaactgtccgtcgttatttttcacctctactgtaacattggtgattgaatcatcatagctaatcgtagcgtcatgtccttgtacttcataaattttatatcgataggttccttctttttgataagtaatctcatcaaaaagaatattatttgccttgttcgtcttttcttgaaggattttattttcttcatctgccaaaacaaaagtgaattccccgtcttcgatctgtcggccttccaaagctttcgtagccgttaaagctaggctagtttcgataatttcccttgtattagctagttcaaagacataatcgacttcctcgttcgagatcgtaaacgtatattctttttcatcccgctcatatccatctggtgctttcgtttcttggattttataatctccatatcgtagcccatctaagtggtcaaattcgctagttccttgaatcaacttattatttctgacaacaagttcggagaaaacaacttcgtagtttccttcggcatttttacgactgagttggaaatgtgcctctttgttgatcccagcttccttatccccttctctgtcatatttattgattgtcaacgagccatttgttcccgttgaagtaccgctaccgttggtagatttgacgattacgtcttttgttacttgatggatttccgtctgacttccgtaaagagacacatcatttgaaacaacttcattatttcgaatgccaggatcaagtttcgtttgataaacgatgaagtatggactgtcaatgacatcctcaaaagcaatacgtaatgtgaatgttccatcaataccattcgttgttacatttggattgtcttgattattgaaaataactttctcaccttttatccattgatctccgtctttgacggctttatacacatcaacaaggacttttcctgtctcatcgtacaagaaagtctgttgattataattgatcgtatcttcaatcacagcattcttgatcgttcgactatcttggttaaccagcacttcccaatccaacagtcgattattgtcaacattttgagtgccattttttgttaaccagtttccttttgcggatttctcaacttacgcttcagcagttaaatccgttgtaccatctgtcaaagagatcatattattgtacttgtaaacatctgtagctgcttcgacagcaatgaagacagcaatcgtttctgaagtgtctttcaacagttctactgtcacttgttttgtcactggatcatacgtcaagcgataatcagctgagctcaattcttccttcagagatcttacttggtttcctgttccggatacgtcaactgtataaactactgcttctttaaacgtttgaccatcttgtaattgatcgacaatcttggttccttcatgaagtgtcgctttatacgtattaaataatcccatccaatagatttgatcacttgtagcaacatcttctgaaaagatatttgggaaattacggttaaaagctgcttgcaagtatgcttttacatctcctccttttggaatgaaaagccctgcttttagcgcgtttaaggtccaagtagtgtccatccatgaatttgcttgagcggcttccctataagagttaccgtcaatttcataatcgacaaaagcagaattactaaaacgtgttttggcacttcctaaagcgatctgtgtcgtcatatcaaaagtcgttttgaatctgaccgtaattttgtctgctgtctttgcatagtttccttttagtttaatttgaaaaccagattcgtactcaattggattttctccagaagtggtttcacgctgcttcgataaatcaaagtcgcttgaagtcaattctttaacttctcctgactggctagttgcagttaaaacaagagagtcttcaatcaattctaatccactaatatttgtcccgctaatttctcgatagcgatctgtgatgaccatattttccacttctacatattgctgatttatctcaatctgccattgaatcgtttgatcctgataactttttgatggtgctgtttttgtcacaccaattttgcttgttggggtcactgttcccgacccattatgagaagttgtcgtatcatctttgatagttatatagttagtaattctagtattcgccagtactggatcaaagagttgtgtctcataacgaatcacatattgtccagcatgagcgaacacaagttgaaattgaacaagctgattatctttttttatttctcctgcttcatcaaagtgccaatctgtcacaatactgttatcatttttgtttctgaccactacagaatcggctactaaataatgcaatgcattttctgaaagtgatccagaatacgttttatcaatgagaattgaaccgtctttgctaagatctaaagaaacctcccaagaagcacgaccagttgactgatcataacctaaaaatcgcttatattccgcagattcatcatagctgactgttgcttcaactgatttttcatggaaattatctccagtgatttgagcaacatttttgaaggagttaatcgttggatcattgacaacactataaatttcaattttgactggcttatcgattttttgattgaatgtaaaagttccagtcgttgagttataagtatacaagtcgctagttctaacccaagcgtctccatcataaaggtaaccataagaatgagaatatgccaatccgcttggtagtttatctgtcacaacgacgttttctagttccttgctttccgtattatatacgatctcccaaacaattgagccactagtacttactttcccactcttcgtaatatcgatttgatagattggtaaagtaatcaggatctcattgccatcacggtcataaataccagtttcgatgacaacatcttctgtgattgttgacactttcaattcggtttcaagattgattgtcccacttctacctgatagattctctgcgttttcattgaaaacaatctttaattctccatttgcatttagataaaagtctcctaatgatcctccacctgaacgctgtaatgtgcctgacacctcattgtgaacagcaaaatagcttggtagctgataaatataataatcaccgtttttgatttcctcctgatcagataatgaccagtcaaagtgaatcttaatattgtcgttataataaggaggattgttttgatcaaaaggttgatcattcatatctgtaattcgtacattatcaaatagttgaattcctcgagcatttaaatctggattaacagcatttggagtgactgcttgttcggtagattcagtctctgaatcctccgtgggtgcacttggctgtattgtattttgattcaactctgaagtggacgtttcagtcgtagtagtagtggtcgctttttccggttgactgtttgaggtatcttcgactgtttgactagtactctccgcgttttctgaagttgttgttgattcttccgtttttgtgtctgtcgcaggtgaattcgattgactcgtttgactttcaacttctatatttgaaaccatttcagctactgcaattgccggtgtacaaaaagtcgcacctagcaaaaccaacaagctcaaatatgcacatagttttttattcatagtgattcatcctttctaaaaaaacaactgttactttttagaaaaacttaatttttttacttttctaaaatataagtttttctaaaagaaccaaccaatataattatttatgatggcaccgtactgtacgttcttccctcattcttccgaagacagcataacgattgatatagctagaccagaacctatttttcattcaataacataccttttttatagaaaatcagagacaagtatcaataaaaaagcatgtgttatctcacctttattttcccaaatttggcataaactaagtgttcaaaaaaaatcatttttcaaatatttttgactatttggaaaaacgtgctaccatcaatacataactgattggaggaaagctatgttcagaggtttattgtcaactgcttcacaaataaaattgtagttgattgaaagtttgttgcatgaccgtcactgttttattgctgatttgctggatgaatttgacctgtctttgtcgttgttcagaaagtatgtgacagagatcaatcacgatctgtcctttcttcaaataaatatagacaatcattcctaagtgagtctggaattccattctttcgcttcacgatcggatgtctatagttttttcttggctgactcttctgctttcaaactcttggaacttctgttttcatcccacttttccagttatgagacactagcgattgaattgaatctaagcaaatcctcaattattcgtttaattaaaaaaatcaacacggtcatacgtccttttgattttcatatagaaaaaaaacctatccgcatagccgggaatgaaatgactattcgccagttttacatggttttctttttggagaaataccaacatgagtttagagatgccagtaaaaatcaggaacaagaatttttaaaagttgcacaacttttggctgaagttactccattaaagctgtatttttctgacatacgaaaaatagcgtttatcatttatgtacatagtaaacgagagaggctttttgccacggaagtgcaatcgaataaaattgaatattttctagaaaaaatcgatctcgctgaattctctcgctacaaacgatcttatttagaaaaagttatgggttatctgacttctcatatcacagccgacccagctatctataaacaagtaaaaaaaatcttctatcgattgactaaacaaatttttcttaaataccattacaccgaaacagactttcaagaaaaattggatgctgttagtttcaaatatttgctggaaacgaatttgaatgttccgtattgtattttgaatgatcgcctggcccattttgttgataactgcgatcctgtccagcaagcaatcaacaaggatattgttcagctagtgactcattctgaattaccggcgattcgccctgctacgatcaaccatttgatttatattttccatacttcttttccactatttacaaaacaaatcattgatcaacatgcagattatcatctcgccttgttctacgataccaatagcgaccatacggaaatgatccgaacacaaatcaaacagttcgtcccctacgacctgaaaatcacgattctcaatccgttagactctttttcaatccctgccgtcaaagcaacctatgatttgattatcggaaatatcgtccctccttttcagaaagttcctttcaaagcaacagacatctttattacacgaaatgagattggctatatcgcaaacagtattcaagaaaaagcgatccagcagattgagaaacaaaaagaacctcttagccctactcactgaaaaagtgagtttcgctaaagaggttctttttaattttgtcgttcgagtaattgtttgccttgagcactctgataaaacgtttcaattaaatgatttaaatttgtttttgtctcactggcgccaaaaagttcaccgccaggttctagcataagaccattggctagacgaccgatcactaccggatcaaagccaaagtcgtcaacgattttggccgtttgagacatagattccggatcattaccagcgattgccatggcttttctggctggtgaaccagccggccgagcttcgtcttgaacatcatgataacccatatggttgaatgccttgataactctgctttggtcaaaatatttttggaccctttctgaagatgtttcttcaacagtcgaatacgttttgctggttccatcaacttcccaccaatagttcattgcatcgatcacaagtttaccagccagctgctccttgggaagtgacggatagttgcttaaagggattgctaataaaatgactggcatttccgtcaggatgtctgagacattcttcacctttgcacctggagcaaggatttcaacagctagagcattcttttccgctggctttctgctagcgatccagacctcatacccagcttctgctcctaattttgctaatgctaaccccaacttgccggctcctaagatgccaattctagattttcccattatttcccacctgatttcaagagttctttgaccctagggattacttttgtaccataaagttcgatagtccgcagacggtctttttgtaattgtccaccggttccataaacaagatcaaaccgttcgacgccgacttgcggcatcgttcgcgcaattttttgtgccacagtctcaggactacctacatagtaagagccatgttctacttcaaaatcgaaacgttctttcgacatctcgggccaaccacggtcttctccgattttatccatacttttcttgatatagtgccaaccgatttcgtacgcttcctcatccgtctccgcaatcaccccatgggaatgcatccctaccggaagaatcggtctgcccatttgctgcgttgctttttgataaagttgtacatagggggcaaatcgcgcaggctccccgccaatgatggctagcataactggaaagccgtagcgaacagcacgaataatcgactccggtgttcctcccacgccaatatacgtatccagtgttccttcgagttttggataaacttcggcattctccaaagattgagtaaatttgcctttccaggtcagtggctcccctttaaggagttcgtaaaacattgctactttttcttcaaataattcttcataatcttgcagatcatagccaaacagtggaaaagattcagtgaatgaccctcttcctaacatgatctgcgcacgaccatttgaaagggcatcaactgtcgcaaatcgttcatagacccgaactggatcatcagaacttaatacagttactcccgttcctaatttgattcttttagtgaccattgccagcgcagctaatactgtatctgggcttgagattgcatactcttcgcgatggtgttcgcctaatgcgaggatatcgacaccgacttcatcggccaactttccttctgcaataatatttcttaatgattggctgtaactgattcgttgatgggtctggtcatcaaaggcaagatcgccaaaggtatctaacccaaattctatttgtttattattgattgtcatatcatttccctcttttcaaatacttcctgcattcactataacaacttctttttattaacgcgaaagatatgcttactttttgtaagtcaactgtttatgaattgcttcaaaaagaaaagcgcgtccttgcttcaaacaaggacgcgcacttttttgtttttttattagccatcagagatagattcctttgcttcttaaattagctaaacactcctctaaatacattgcagtatgttcaggataaatagggactgattgctcaatcggctctaacacctgataaggagctgtcttttgcccccgataagtaggctctaaccacgctgctgctggacgatagccgcgacgctgcatctctgccatgacaaggagatggtattggtacagcttatatggagaatgagcaaaaacgtaatcgactgtcgcatgtttctttccccagccagcgcctctcagcgcagctacttcccgatgctgtcccagtaattgttgtcttggtaatttaggcaaaagtgcttcatgccacaatctcatatcctcagttcctctgcttcgcttgatttatgtctgtaatttattggttgtcgagcacgattttccctaccgcatggtgtgtttcacttaatgcatgggcatcatagacaccttgacgagtcaatgggaaagtttcgccaatcacacttactaatttgccatcagccattagtttagctaattcgcttaactgttctccatttgtacgtaaccaaattgcttttgcttcaatttgtttcgttgcggctaatgtttcatcttcaatactcagtacagaaatcaagcggccatgctcttttagaacggagaagcttttcttttggatctcgccacccattgtatcaaaaactaaatcaatgtcagtaagaacttcttcgaaatccgttgtatggtagtcgatcacttcatctgcacctaattttttaacaagttcatgattacggggacttgccgtcgtgatgacataggcgccggcatttttcgcaagttgaatggcgtaggtcccaactccgccagctccggcatgaatcaacactttttcgccagcttttaacgaaccatgatcaaatagagcttgtaatgcagtcaatcctgctagaggcacagctgcagcttccgtgaaggcaatagattctggcacaggcgccagtaagttgctgtccacaatcgtataatccgcataggtcccaaatcgtgtcgtctctggacgagcgaaaatccgatcgcctacgtgatagtctttaaccttctgaccaacttcaacgatttctccagcaacatcccatcctagaataatcggaaatgaccaaggaaacatttgcttcaagtatccttcgcgtaatttccagtcaattgggttgatcgaagttgctgcaactttcaccaacacttgatccgcaccgagttcaggtagtgaaactttcgcttctgctagtttttctttaccaccatattcattaataacaactgctcgtgtttccatgtaaatcactccttgagattatgtaaatgagcttccgtcatttttctaaagaaacgaaaggtctctttcatagcttaggcaatgatccctgattttacaactgattcgactttcccttttctatcagaaaaagcagttttttcactgactaactttttattgcctttttaaaaggtttcatttattctacaggaataagaatgtgataagaaagaaggaattgatgaattgaaaagattgcacgtattttttggcgggatcattgcgatcctaggtattctttttgttggcaaagctgtactgtccaatgaaacaggaagtgcatcagcaaatgatgctaacacggttattatttataattggggagaatatattgaccccgatctgataaaaaaattcgaaactgaaagtggctattcagtgatttataatacatttgattcgaatgaagcaatggaaacaaaggtcaaacaaggcggtaccaggtacgatttgattttccccagtgaatcgatgattcctaaaatgattgaggagcagctgctgattcctttagaacatgataaactcgtcggcagtgaagatctttctgattttctgatggatcagcgctttgacaaaaacaatcattactccattccttatttttggggaactattggaatcatggttaatagtgaccaaatcgatcctaccaccattcatggctgggcagatttatggcgcccggaatttgccaacgatattctagttgttgatggcgcaagagaaacgttaggaatggctttgcagactttagatctttctcaaaatgagctagatacagcaaaccttcaacaagccatcgagaaattggaagcattacgccccaatgtcaaagcagtcctcactgatgagatcaagactttgatggtcaacaacgatgcaccgatcggcattggctattcaggagatgcagcgtatgtcatgtctgagaatcctgctataacctatgtcgtccctaatgatggcggtgctatctggacagataactttgcgattccaaaaacagtcggcaatcttgaaggagcttatgagtttatcaatttcatgctgcgtcctgaaaatgccgctcaaaacgctgagtatgtcggttatgcgacaccgagtgagaccgcgaagcaactgctaccgactgaattgacctccaataaagctttctatccagagccggaagcaatgcaacagatggaacactacgaatacttaggaaaaaatgccgttgaacagtacaacgatctttttctcgaatggaagttgggattataaaatgaatatactattgaagtcttcctacatttttgatacagaaagaaaaacgacctttgctggttttattttgattgaaggaactaggatcaaggatgtgggtcctttggatgccacacctaccaacttaccagctgaaacaacgatcattgattgtcatgaccaaatgatcattcctggctttatcgatgcccatattcacttttatctttccgctttgctccatgcagggcagttaactcatgtcactggaacaactgaagaagcagttgcccagcaagtaccgcaaattcctgtgacccatggctggaaaattgggattggttggttcagcagtgactttggacaacaagtctatcccacaaaagcaacgattgatcactactgtgacgaagtgccagtcatgctgatttcaggagacgcccacagcatttggttaaacagtaaaggaatggaaaccttagaaatcacaaccgattcagttcctaccggaatcagtggagaagcattgatgaaagatggcgaattgacgggttgttttcttgaggcagttgctattaattacttggcggaggtgctgcaatcttttcaagccaacagttactcaacgtacctttcttacatgaagcagctcaatcgttatggcattactacaatcggcgatgttgccctgactggcgaaagctgggacgacttgatttatccagagctttaccaaaaagttgccgaaaaagcgactttacgggcggttttttaccctgcgatgcgaatggaaatagagcatttaactgatatctatcaaaactatcgatctgagaaagtccaaatgggtggtgtgaaacagttctttgatggtgtaacaagtacccatactgctttgttgaaatcggagtacgaaacgccttattttactggtgatattggtatgccgctgattgcaattgaaaaaatgcgccagttgattttcttagcaaaccagcaaaattggccgatgcgcatccatacgatcggtgaccaagcgatccatcaagcgttgtctttttttaatgaaagtcatgcgcgcttccctctctctgccggtaaaaataatacactggagcatttggaagtcatggatcctgcagatctttctttagtggcacaagacaatttagttctttctgttcaacctagtcatttattagtcggctatgaaacgttagatgaagaagtaggtccgcaacgcgctagtcaaatgtttccttttcaatcctttttggcccacgatgctgtagtagcatttggaaccgacagcccagtagtgatcgatgtgtctccattggattcgatctattatgcagtggctagaaaagaaaaaaacggctctccagtagaaggattgatgccctctgaagtgatgaatgtggcagatgctctggttgctcataccgctgatgcagctcgggcactcagtcgacaagacattggttcgatcaaagtcgggcagttggctgatctttgtattctttcgaaaaatattctttccctttcagaaaaagagctgcttgaggtagaagtcactgcaaccatttttaacggtgcatttgtctatcaaaaagacgaagcttcgcagcaaaattcctaattggatctttgaccatatccctcgaatacccgaataatggctgacttgcttctctcgtccgagggctctcattcatggaagacccttgactgtgttcacgttcacgctaatcaaccgtattattcgggattttttgtcaacaccaccctaatcccccatccttttttcgttctggatactgccaggctataatttggttcctcttgattgttccctctgatcatttctcgctttgtttcgtcttgattcctgctcaatcattgccctcttgatttccctccaattccttaaaatatatacaatatgaccaacaggatcccaccaacgatttcacttattggatacttgcgattaatcggtaccaaacaattcctgcacttgccttttaagaataaaaatgaccaaatagggatcagctgccacggggttagtacctttccacagtgctcacaatgagagcggcctcccaatgattcctgacggggcaaacgataaacaacaaccatcaaaaaagaactaagacagctaccaagactaaatactgataaaatgggtaatagcaacgctcttcccaaaccacacactcctctcgtctaatcgacacctcaaataaagagcctattcataagcaaatacgctcttttaaacacgaagtttttttattcttcagcgacgtactgctgacagcggatacctagcagtacgtgatcgtctgatttatgtcatcaaattgattggatgtgactctagcctcttgctcttatttgctactgctgacacctcctttgttgcgaaacaaactgagtgttactgaccatttcttaaagaaaattcattgatgattcgaggattgatttcccacaatagtcgattccaatcctctgcgtctggaattgacttaaaaagcaaatgccagtttccaatcaattgatcactgacatattcactataatttgtcactactagatcaatatgattctgctctaaataatctaagttcatctctaatgcattcgggaaaaacaggtgctggaaccggccaagatatttgatagccattgcttggatattctgacaaacaaggtagtttccctctaataaaaatacaatatttttaggtgctccccaatggatttcctttagtgagtccatgaataggacggccatcacggtgatttctgttactgctgtctttccccctgagattgtctgatggtgttcggtaaagaatgctaataactcaagatacaaatctgggtatttctcttggacgacttcatgaatatcaagaatattttgatttgtgactggtgatagctgttcttttaaatacagcatagtaaaaaaagaacgcacaaggatcatgtctctctgaaggtcattactctgctggccaaaagcggataaaaatagttgggcacagtctgtaatcccaacattcggctggagttcctgaataaactgctgctctccagccagatccgtcaatgaacgccgacacaaaatcatcacatacaaatacaataattcctccactggcaaacgtttcccgattgacgcatcaatcacatcattgatagttgaaaaacgctggaatgcctctcgttctttcagcgcttgaatcatttctgactcgataagcaagtctccctcacgttctaaagtaatcattagagtataactaaaatctcccaaagaaacattgggatagctgctgaagaagtgctttttttgtaaggcaaaggcaatcgactggatggcaattgatggcaagaccgtgtgtggagttatttctgattcataataaaaatcatgaaagaaactgcgaatatcgatttcttttccaatgaaatccactttcttcagggacagtgtcagtcgatagcgcgccaattcattttctaccattttgaaatagcgcagcaaactactttctgagaagtggagttgatcggcccattctccgatctctttgatctgcctttgaaaaatcccttcaataatgtgaaagagtggttcattttcaagcaatgaccgctttttagtttggtacgcttctcgattggtttctttgaacaaatagcctgaactcgtgttttcaatcagaatcgactgctgaaaatattgccgaattccggtaatatcggcaatgatcgttcgtgaagtgctttttgtgaattgggctagttctttgactgatcgcgttggtattcgctcgaaggtatgcaagattttcagccatcttacagtttccttattggtaataaaattaagttgaaaatttttcatctcttttctccttactggttttcattgccgttattgactgaatcgttttccttattatacgccctgcggaggaattatactcagttgcaagcttctggcagcaccagttatcgtgatttatacgagataaaggaacccagttatgaaaaaaacggtcatcttgacaaaaacaggtatcgaattgtataaaattgttattttttgttaaagccctcttgattgtaagcggtatttttgttattctttaaaggtagaggaggtggatagtgcagtgtatgctatcaagatatttcatggttatctgacagcacaaggaaaaagaactcgagataaatcaattgctttgacttatacatgcaaagaagatgccgaacgcttcgcaaataaaattggcgggagagttaaaaaaattggataacctaaactattgaaaaagagtcgtcgaccattgattgttgaccactctttttgttttgttaaaaaatattctctaacaaatccttttttctatttgtttttatttctcgcttgtcaaaaataaaaatacactgctgcgatcaattgttgaatggccatttcttccccttttcacttctattagccaaaaaaaaatgactgaaacgtctgagttgaaacaaagtgttttctcgctcagaaacggttcagtcattttctttttatggaatagcgatagtcacatcgactgtctggatcgccacgtcataaaacggatcttctcgtcttcccaagaaatcttttgcttgagctgggaaaagtgcatacatcagtacatcttcttccgttttggcatattctttgatttcttgctcgaattccgggagctgcggtggaatcaaatctgctggtcgttcggtgatcactgcttccgtcccaatgattttttcttggatcttcgttttgattggtgccggaggacgaccgtaaagaccacgaacgtaatctttgatctcagttgggactagtttgtagcgttccccagaaatcacattcatcaaagcctgtgtgccaaccatttgagacaaaggggtaactaaaggaggaaatccaaggtcggcacgcactttcggcacttctgccaatacttcttcgtacttgtcctgcagaccttgttctgtcaactgactcaataagttggataacatcccaccaggcacttgatagatcagtgtttttggttctgtatctttgactttaggattcaagatcccttcctctcggaaccgatcgcggattggattgaaataatcagcaacttcagccaatttctttttgtccaggtttatatcaaatcccagttcttctaatgcgatcgccacagattctgtcgctggctgactcgttccccctgcaaatgaagaaattgctgtatcgataatatctgccccagcttctgcaactttcaaataagtcatttctgaaataccactagtagcgtgggtgtggacctctaatggcagatccacagcatctttgattcggctgaccaattcaaatccgatttgaggtgtcagcacaccagccatatctttgatacaaatcgaatctgctccaatatgggccatttcttttgctaattgcacaaagtattcaacggtatgaacttcgcttgttgtataagagatcgctgtttggcaatgaccaccagcttcttttgctgttgtgatagaagtcgccaaatttctggtatcgttcaatgcatcaaatacgcgaataatatcgattccgttcttgatcgatgtctctacaaattttcgcaccacatcatccgcataatttttgtatcctagtagattctgtccgcgaagaagcatctgtaatttcgtgttcttcacttcacggcgaatctgtcgaagacgttcccaaggatcttcatttaagaagcggatacaagaatcaaaggttgctccaccccacatttctaatgaatggtagcctacttcatccaatgttttgatgatgggcaacatatctgacgtcggcattctggtagcgatcaagctttgttggccatcacgtaagactgtttccatgaattgaattttcttagtcatctgcttgcatccttccttttgaaactaattcatttattttttgctgtattgcttcgactgaatgcgttctcgatcgtccgcatagttttgcttccttgtcacaaagaaagcagcgccgtcttggatagcctaacgcttcgcgactgatggactgcacttcacccgcttctagccaaagcacgtcaagatctgctaatcgcccataaggatgtctttcttcaagtgccaccatccttttctttagttcttctttttttaaaggaagtaaaagaaaatattcatagccagttttttcatttcgataaagatgaaggaatgaaaaggcatccgccactgctcgctcgacttcatccgtcaagcttttaaacacagcttctaactcatctgatgttttgacaggtccgggaatattcatggtggcagatagcagtgtgtattggggcgccgactccagtaactccttttgccgttttgcacgctgttctctagccgccaatacttctgctaatgaaacttccggtccctcaaataacaagctacacatttctcacaacatcaatgagcgtgccgtctcgatattcaatcaatgccactactttatcgccataatgaatggcttcaggcgttccaacaatctggtaagctttctcttttaactcttcgatcgtatactgaggcacatctagtgttttaaaatgttcaatcaaatcttgacgatctggattgatggcaatccctacttctgtcacgatcacatctatacttgttcctggagtgaccactgtatttactttgtcaacgatcgttggaattctgcctcgcactaagggtgaaataacgagactcattttgcatgccatactcgtatcagagtgcccgcctgacgctccccgaatcacaccatcggatcctgtcatcacgttcacattgtagtctgtatcgatttccaatgcggacaaaatagcggtatctaattggttgatcactgatcctttacttaacggcgaagcatacatctcagcatcgatttcatagtgtcctgcattgcttcctaatgaaacggctgaagaatgatcgaaatcttgtacatcaatgattttttcaaccaatccttcctccaatagttccaccattgcattggtaataccgcctaatgcaaagctcgcttttattccatctttaagcatcgcttcgcgcaaaaagcgggaaacagctaatgcagcaccaccggtacctgtttgaaaggagaatccctctttatagtaaggagaatttgtgatcacttttgctgcgtattctgcgatcaatagttctttcggatttttggtaaagcgggtggctcctttggcaatcccttgtgggtcaccgattgcttccacttcaaccacataatccacgtcggtttgcggaatactgattggtgtattcggaaatggcacgagcgtatctgtgatgatcacgactttgtctgcatattttgcatcgatcattgcgtaacctaatgaaccacaggttgcttttcccaccgtaccattggcattgccataggcatctgcacttggtgcgcctaaaaaagccacatcgatatgcacatctccagctgcaatggcccgagcccgaccgccatgtgaacggatcacaacaggattttccatgattcctgctgaaatagcagcacccacattgtctctcaatccgctggaagtaatattggttacaacgccatttttgatatggtcaatcaacggtgcatggacatttgcgatggagctaggggcaatagaaatatttttgatacccagaccagcaatttcttccaagaccatattcatgacataatcgccttcacgaaaatgatggtggaaggaaatcgtcatgccatctttcagccctgtcttttcgatcgcctcgcgaatactgctaagaagtttggtatctcttggacgaacgggggtaacggtacgacttgcttcttgatacgtatcgatatgcgccaattccccttcaaaaacaccgtattggtcagcatatacttgtggaatatcttttcctactttattcatgaccatgcctaaatatcctcctccgtaatcaacttcgctgccttagccaatgcaatcactcgctgtgcacgttcaacgattggcttgtctaccattttcccattgactgaaataactccagagcctttcgcttcggcctcgcgaattccccagataacttctttggcattctggatttctttgtctgtcggtgtataaatagcatttaccaacggaatttgtcgtggattgatcactgactttccatcaaatcctagctgcttgatttgttgcacttcattttggaatccttctacattgtccacatcggaatagacagtatcgatagccgcaattcctgcagctctggctgcatgcagaatcatgttgcgggcaaaggataattcctgtccatccggatagcgcttggttttcatatttgtgacgtaatcttctgctcctaaagcaattccgatcagtcgctctgacgctttggcaatctcccgtgcgttcaataccccttctgcagattcgatggctgccatcattttcgttgtgcccactggaatctgattgtctttttcaacagatgtaatgaccgcatccacatctaaaatatcttgtgccgtctctgtttttggtaagcgaataacctcaacgccagccaaaaccattgcttcgacatcttgggcgccacctgcctccaaactattaatccgtacgactgtttctacattgctgtaatcaaatgttttcaatgcaaagtgaaccaatgtacgcgcggagtctttttctttaagagaaactgcatcttctaaatcaaacataattgagtctgcaccatataagggtgcgtcccttagcattgctgcatttgcacctggaacaaacatcatggttcttcttaagcgttccatgaatcaatctccttccaatcatatgcgtctttttttgctgcccgatgaatcgcggtaatggttcgagcttgaatcgtacaatccaaagcgcctttatcaacggcagctactcgaacagacttgatccctaaatttttgatggtctcttcgatcacctttttgatttgttgaccaaattgtttctctacactgctttccaaagaaatttggatttcgtctgcttcagtcggctcgacagtaatcaaaatgtcgcttgactctactgtaccggctactgcgatttgtgtaatttccatatggtttcacctctcgttttttaaataatgatatgtcgttgatggcaaaaattgtctcaaacggcggtcatcctgatttttcaaggcttctctaactttggtagcactgatgatctcaccatcaatactcaatctaggtaaaataaccaattctaatgagtcgccaaacatttcctgcatcgcatgattatacgtatcggtcacctttgaatagggttcttctccgacaaaccgtgtccgaatgtctaatacaggtgctatcttctctttaaacagttgcgcatcaacctttgcctggatcttcgctactgtttctatggcactgtctttcagaaagtaggaaggaaacgttgcggaagatacaaggtaatcattggtgggaaaaactgttacattggacaagtgtgcgactccacgttttaccatttccatccgatctgcagtcgaaaactttgaacgatcttcggataacacaaagacataaacttgctgactctgctgcgcagctgtctcgacaagatactgatgtcctttggtaaagggattggcattcatcactatcccgcttccgatccccatttttttccctttagccagcgtagaaagatagctcgcaaaatttggcaatcctcgttccataaaaagaatttctgaggttgcgatgattttctgaaaccctagtgagcgaaagatcaattcattgctgggttttgaatacaagaaataatgttgttccccttcttctgccaagcgatcaaccagatgttgaatgatgtccgtcagtagattttctgattgaaaggctttgcaaacaaccaagcatttcaatatgttgtgataataggatccagtagcaaccagtaaatcgttatcgtagattcccactgtgtaatcaagttcttcctctttattcagaccggctcgatccatcaaggaagcccactgtttatagactccttgatctcttagccatagccgttttaatgaatacataaacgtctcttctttatctttttatttttttattggaaaaagtttgctaagcagcatcgaagcaagatagataatcaagataaccacgaagacgccgccccatcccagcactaataattccagtgatttcattaaatctgctgacatcgaatctctcctttcttaggttagtaaggcaagcaataaaccacctgcaataactgaagcaatctgaccagaaacattggcaccggctgcatgcatcaaaataaagttttgtgggtcttcatccgttgccattttttggatcactcgacttgacataggaaatgcagaaatccccgcggctccaatcattggattgattttttcttttctgaacaggttcagcacttttgcaaacaagacaccacctacagagtccatgatgaaggcaaccaggcctaaagcgatcaccatcaatgtatcgacttgcaaaaattcttcatactgcatttttactgagatagagagccccaacaaaatactaatgatatttaccagctcattttgagctgtgatagaaagtcggtctaatacgccgcattctctcaagagatttccgaacatcaagaaaccaactaatggcagagatacaggggcaatgagcccggcaacgacagagataacgatcggaaaaagaatttttgctgtttgcgagacttcgccagcgcgataattcatatgaatcgaacgctcttttttcgttgtgaccgccttgatcgcaaccggctgaatgatcggcaccaaagccatataagaataagctgcaaccatgattgctcccatatatttggaattcaaagtgttggctacaaagatggatgttggaccatcggcggctccaatgattccaatggaagctgcatcatttaaatcaaatccaaataaaacagcgacgataatcgtaaagaaaataccaaattgggctgcagccccaaataaaagcagaaaaggattttggagcagcggaccgaagtcgatcatggcaccaattccgataaacaaaagcaatggaaataactcggttgagatccccatatcaaacaatacttgaaaaggaccaggttccccgccagcactcaaaacaccagagttcgggaaatttactaaaatcgttcctagtcccatcggaactagtagtgttggttcatattcttttttgattcctaaatacatcaggatgccaccgactaccatcatgacaatccgtccgggttcttgtcccatccctaaaaagccttcaatcagagtttccactaacgtcacttcctctattcattaaattttttattgattcatccctattaatgaatcgtaatcaatgggtcaccaggattgaccatctctccttgattgacatgaataccagctaccgttcccgcttttccggcaacaatctcattttccattttcatggcttctaatatcatcaatggttgattttccgccacagtatctccaacattcactaagattctcaaaatcgttcccggcattggagaaggcatggcatctgcgcctgcggcaatgggtgcctcagaaacagatggtgcctcggatgcggctggtgttgcggtttgcggagctggtgtttcaactacaggttgaacgggtagtacaggttgtggtgtaccaccgatttcttccatctctactagatattctttgccatcaatcgaaattttaaatttacgtaacattgtttttcctccaaaatgctaatttttgttgattcttcgaataacaaactgactcttttcatttaatccagcagctagacttgacgcgatgatggaaacaagtttcgcctccggattgcgctgcattactttcttgaccacaaattggctcttaggttgatcacctgccgcaatggctgtcgcgatcaaactaacaagttgatattcttcttcactagcttcgatatatgcaggaaccgctttccatttcatttcagattcattatcatcgagcgtttcagaagatgtttttgttatttcttgatgtggttcactttttttgaacagtcgggcgaataatcccatgaagttactcctttcatttttttcgttctcaaccacattatattgataatggaccaatccggtagttctaaatcaaagattattgttttttttctgttcctatttcttcgccttacaacaaaaaggcttataaacattgttaaatcaacgtttatcaaccgttaagattttattaatatcttgttaagcctcttttaagaacacctataccaaattgtttttttcctgttctttttcagaattcaatctatcttatcaaatgaatattgcttattctatagtcgtcaaacggaaaagctaattgtttccaatacgtgtctttctcccccaaaaggcatgaagatttgttttttattggaatgaattggcaccgtttacaaaaacagaaattattaaatcagttgtagaaaggaagaaaaatatgttattgacggttttatcttatgccatgattattgtctttatgtttgtaatcatgaaaaagaaaatgtctccattcacttctttggtggtcattcctttgattttcaccttagttgcaatggtgtcaggagtatccaaagaaggaaacatcggggattttgttctagaaggaatcaaaacaacttctaatacggggattatgttgctgtttgcgatactatacttctcgatcatgctggacgctggattatttgatccgattacaaaaaaaatgatctatttcgcaaaaggcgatccgatgaaagttttgatggcaactgctgtcgttgcggccaccgtttctttaaatggggatggaacgactactaccctgatctgctgttcagcctttattccgatttataaaaaattaaacatgaaaatgatgaaccttggggtactggtgatcttgcaaaataccattatgaacttgctcccttggggaggacctactgctcgagctatggccgttttagaagttgatgccgatatccttacttatctggcaccaggaatgatcatctcagttctttatgtcatcttctttgttgctcgcagaatggggaaacaggaacgggcacgcttaggaatcactgaattgactgcagatgaaatcgaagaaatgacaacggtaacagaccctgaaacactacagattcgccggccaaaaaactttcttttcaatggtatcttgacgattggattgattgcatggctcgtagctagctcattcattgattcgattgcactgccaccacttttgttgttcttagttggaacgtgtattgctttaatggtcaactaccctgttttaaaagaccaatcttcacgaattggagccaatggcggagatgctgttcaagtcgttatcttagtctttgcagcgggcgtatttatgggattgttccaaggttcaggtatggcagaagcattggctaacagctttactcacattattccgaaagaattagccggcttctgggggctagttatcgcccttatttctgcgccaggtaccttcttcatctcaaatgatggtttctattttggtgtgctacctgtattagcagaagcagggcgtgcttatggctttaccaatatgcaaatggctcttgcttcattgatgggacaggcgttccacttattaagcccattggttgcctttatctacttgctgttacgtttgactggattggatatgggtcaatggcaaaaagaatcagcaaaatatgcattgggaatctttgtcatctttatcgttaccattgtgttattaggtcatatgccgctttacattccacaataatattcaggattgatagggacgggtcgtcattgcggtctcgtccctatttttattagtaatacatgaggaaatcaaagaaaatcttgaaaaaaatttactagcatgttttattttcagaggtatcatgagaaatgaggaaaataaatgagtaatatagttgaagccgttaaaaaaaatcttgatttaacacaaaacaaaacattaaacgttctgatttatgaagcgtttcgaaaaaccatcatccttggtgatattccagcaggtactcgaatcaacgagaaagtctttgctgaagaattgaacattagtcgaactcctattcgcctggctatgaagcaattagtgaatgaaaaacttgtcgaacatattcctaaagctggaatcgtcgtcaaaggtattcgtatcaaagatgcctacgaaatttatgatatccgtaaatcattagataccctagcaacgatcaaagccatgaatcaaatgactgaagcagatttccaagaactgcaaacattattagaacaaggggaacaatataatgaggccgatgaaatagagctggttttaaaaaatttctctgatttcaacgcatttatctatgaaaaaagtcaaatgcctcgcttaaaatcaattgtcctagaactacaagcctatctcgtttattttcgcgacatcgctatccgttcgacgaaacgaagagataaagcattggaagaacactggctgatttttcgcgggatgaaaacaaaaaatgtcgaacaaatcacgctgatcacgcatgaacaccttgatcgatccttgcagtttattttggcggaaatggagcgtagacaaattgactgagtccctttcgaaccagattaccgactatgccttcaaagcattgttctatgaagtcagtctcagtcctaaacctggacttgtggatcccttgacaaccggtgcgcaccaagacatgaacttattcacatttatcgatagcacgatcagcttacgtccttattttcaacagtacctacatgcagggctgacacacaaaggaacccctagggagttgtttgataagcttagaaaaatcggagtagctgcagaaaaagccatgctgcgtgcaacacatgccatcaatacgcataaaggagccaatttttcttttgcagtcattttaggggcgactggctggtacttgcaagaaaaggcattgcctttaataaaagaagatagtgagaggattttgacttacacgcagcaaatgacaaaccacctactcgcagaagatttcaaagacttagagataaagacccagctcacttatggcgaaaagctttatctggaatacggaataaccggaattcgaggagaagccgcagcaggctaccctagtttgtcgcataaactactcccctttctacggacaactgttgatttcccaatggaggaacgtttattgcggggactgattttcttgatgagtgaaatcgaagatgggaatttattgcatcgcggtggtttatccgcttggcaaacagtgaaagaagaaagcaaaaaaattcaccaagccaccttctcaaaagaagaattgcttgatgaattacaaagctatgataggattttgactcaacgccacttaagtcctggaggttctgcagatctattggcattaggtatttattttgctcaactagaagagatcctttaaacaccatcgggcaaaaaggtatagcctaatccccatactgtcttgatatagcgagcttgctttggatcatcttcaatcttatttcttaaatgattgataaaaaccatgaccgtatttgcgtctagctcactgccgttccatacgctttgatagatttgttctttcgaaaaaacttgatccgggttttctataaaaaattgcatcaattttgtttccttggatgagagcttgattggttcttcctttttgtagagttggtagcgagacttgtcaaagcagaaatctccaatcatgattttgctctcttttgaaagggcacgatgctctttgataacttgccctctatcaagggtcactgttacttgtgctcttaataagttaggcaaaaatggcttggtaatataataatctccacccatttccaatccagtaatgatgtcttcttcatttttcttgccactgagaaaaatgatcgggacaagtggatcttcttcacgtataatctgagcaagatagtacccatcgttttcatgttctaaactaatgtccaataaaaataaatcaaattttacccgtgtcatgatatcgactgtcttttcaaccgaatcactttgataaatcaagattccggtcgattggagtgatttccatatcaatcgtcgtattgctggatcatcatcaacgacaagaattttttcgtttctcactttttttcctcctagttctttggatcaaattattaaagggagcgttttttatgaaaaagccttcaagcagattgcttgttctaggaatgatgaccgtcctctttttgactgtattaggaatggtcatcacagcaaacagctatcagcagacacaaaaacatgcgttaaaaatgggggagaatcaactagccaaaatcaatgactctgtaatcaaaatattgcgattggaaatcaaatcttacactttagcactggaagattatgcttcgaatatttttaatgaaaaaaattaccatgaactgatcgaagacactcagttggacaacagtctcctattcaagacctcggctgccgccggattatatcttgtttcaccaacgggcactctcctttctggcaaagacatccatgctgaccaatttgttaaagaacctgtcaaagtcacggcttttgatcaagatcccctttatctcaaagctttaaagggttcggttcttcaaaacggcgaagcttactttgctgatgatacgtcttatgtcaatttatatcgaccggtctatgacaagcatcatgtgcttcaatctatcttggttctgccaatcaatcttgaagagctatatcagcaagagattgacacaacagaaaaccaaaatggctatacgatggtcaaaaatgaagaaatgaaagtgctcatgcacccttccaccgaacaaatcggattagacatcatcaatgggcgaaagctgaaatatcctgacctcgactacagcgatttggctcatttagaagatgtccaaaagaccaatgaaaaaggaacattaagctacaattcttactggtggacagaagaagaccccaaaaaagttttaaaaatctcagcctatgaatggattacggttggggatgcacgctggatcgttgccagttcatcggacttttatgaacgaaatggactcgcactgcaaaaaaatctgatcatacttggcttactgaccattctcttagcaatcatcattcttttagcagtcagttttagtcattacaatcgccaaaaccggacctatatcgaaaatctgcgtttagttgaacggcaaaattttttgaaggaaaagcatgcccttgaaaaatcaatgatgcaaaaatcgcaattggaaacagtaggtctgctaaccactaccattgttcatgacatgaataattttcttactccgatgatcggaaatctgcaactgttgattgaagaataccagtcaaacgaagcgctcgttgctgatctaaatgaagtctaccaagcagcgcaaaaaggccaaaacctgtctacgaatgtattgcgctttactaagactggaatcaaaacgaaagaatccctctcgatcgaagaagtggtatcaggagccattgacaccatgcgcgtactcgtaccaaagaaagtcacattgtcctatcaagcttcttttgtgggcactgcactcattgaagccagtgacttacaagttattttatacaatttgatcaccaatgcttatcaggctcagccagaaaacccgcacatccaagtcagacttagtgcagcagcagataagcagttgacagcattccaaaaccattcacttgcttattgcgacaaacattttgcgcaacttaccgtgacagataatggtccagggatcccgaaagaaatagaaagtaaaatgttcacgccttttttcacaacgaagacagagtccaatggaactggtctcggcttattcatcgtctcatcgattgctaagaaaaacgattggatcttacaagtaaaaagcaccgtctatggaacgacctttacactagggattccagtagatagcggcaacgttcagtaatcgcttgcattacttatctaagccttttgttcgttcattcactatacctttattataacgaaaaagaatgaaggtttgacgaaaagtacaataaaaaaccagctattgtttgtcgtcatcagccgaaactcattttagtttgtcacggaaattccctcttgtttttctgcaatgaaaaaattacaggatagctcatcgcgtgattattagcgccagcttctgttctgcttttatgtcattaaagcccttctcaagggctttttttgttgcagctgtttttaattgccgcgatgattttacaaaaatcaaaagttttaaggtgtgttcgctttacaaaagagaacgtatgtttgtattatacaactagggaggcgtttttgatggggagatttaattatgaagaagaaccgttacgggatattttgttcattgatgtaaaatctttctatgcatctgtcgaatgtgtccagagagggctagatcctttgaccgccttgctagtagtcatgtctcattcagataacacaggaaacggattagtcttggcagcttcgccaatggcgaaaactgttctggggatcaccaatgtcactcgtgctgacaacttgcccaaccacccggatctatataaagtttcacctcgcatgaatctatatatcaaagaaaatttgaaagtcaacaacgtttatcggaactatgtggcggatgaagatctcttactctattcaattgatgagtcgctgatggatgtgacgcaaacgttacatttattttttcctgatccttctctttctagaagcgagaagcggcacaaaatggcagaaaaaatcaaagcccatgtcttcaaagcgaccggactgcgggtaactgtcgggatcggagataatcctcttcttgcaaaattggccctcgataccgaagcaaagaaaaatcccaccttcattgccgaatggacatatcaagatgtggaaagcaaagtatggggaatttcgcagatgactgatttttgggggattggttctcgaacccaaaaacgattgactcagttggggatcgaatcgatcaaagcattggctcatgctgatccagattttttgcgcagccgtatgggcatcattggggaacaattataccaccatgccaacgggatcgatcgaacgattttagcagaaccagccccaaagacaatggaaaaaagttatggcaataatcaagtcttaaatcgaaattattacttgcagagcgagatcgaattagttatcaaagaaatggcagaacaagtcgccgcccgaatccgccgtgaaggctgccaaacacaatgtatccatctctatattggaacagcttttggagagacacagaagggctttgcccaccaaatgaaaatccctgcgacagataacaccaaactattgattgctcacgcactgttcttatttcgcaaatactacacaggacaagtggttcgtcatgtggggatcacttattcgagactggtttttacccaaagcgttcagctcgatttgttccaagatccggaagaacaactaaaacagcgaaagcttgatttactgatcgataaaattcgcgccaaatatggatttacttcaatcgttcatgctgccagcaaattagaaggcggacgagcgattgcacgggcgaatctcgttggtggtcatgccggtggaatggatggtatctcaaacgaacctcaaggcaaagcagttcgtccaaaataggatggctgctaagcattttgctatacgcctatctcttttgctgataaattgaatctgtggaccagccggaattcacagcattgctaaaaaggaggaaacaccatgtgtgggagatatttatttgatccaaggacgggtgagctgtctgattattatcaagaactagtcacgatagctaaagaacaaaacaaaaaaatcgctgttgatgaagttttcccttccaaccaggtcgtcacgctgattgccgatgacacgcagcaaatcgtaccgatcctaacccattggggctttactggtttcaaaaaaggccaacttttaatcaatgcccgagcagaaaccgtagaagaaaaacgtactttcaagaagccatttctggaaaaacgctgtgcctttccaatgtctggcttttatgagtgggatagcgataagcacaagtttctctttgactcctcggagcccctctaccttgctggtttctatcggaaccattctactgccagcggttcggaagatgaatccattattttgacgaccaagcccaatgcaacgattgcaccaatccatgatcggatgcctgttttgttgtcgaaggcagatgttttgccttggatcacggatgtgactttcgcaagaaactatctactccaaacgatgcctgatattcacccacaacctgtttcgtaaaccaaaacgccgccagaagaatttgcttcttctgacggctttttttagcgagtgacggctttaataaacagtaaaggtccgtcctgtcatgataccaaaaactgatttttcataggcagcaaaaactttttcatccgcgacaggcagaaagccttggaatgagggagcataggtctcccaagagcctgccagcgcattcggactgaccgcattgatacgaatgccacgaccaatttctaacgccgctgaagcaacaaaagcaccgattgcgccattcaccaatgccgaagaagtacccatcggaataaactcgtcttgaatgatgcctgaggtcaacgtgatactgccgccctccgttaaataatgctgtccgatcaacactagattgacttggccttgcagcttgctgtcaatggagcgctgattttcttccggtgtcaactccgcaaaaggtttgaagacggtactacccgctgcggaaataatagcatctacagtaccgatctctgaaaacagcgtccgaatactttctggatcagcaatctccacccggtagtcccctgcacttcgactcgccctgataacctcaacagatttgtcttgtaaaccagccagcaaaattttccctaacgttccggtatgtcccactaaaagaactttcatccaatcatctcatttcgcttattttttctcattctacggcagattttttctttttacaaacgttagctgtccttttcctctttctcctctttctgtgcaggtaagtcttgatttaagaggattggataaagacagctattgtcaaattacgaaaaaagtttgaatgttttgtgaaacgccttccttgtaaaaggacttctatggtataactctaaaaaagaaggtgaagcttatgaaaaaagaagaactttgtacaagtaaatcctatttagcgaaagtaatcggacaacctaccttacaaaagatcaagatcgttcgcttactgagcaatacagcgactgtcgaacttttagaagggggcaactacggcgtagccaaactcagtgacatccagccattgaccgattagcggttagtaaagactgctctaaaaaagcgtcaagcaaacaaggaaattcctaggcttgacgcttcttctatcttattaaaaaagtgagtcttatccttgatgaatcagagttgctctgactgcatttggtacatttgctgatagattcccccagcttgtatcagactggcatgattgccccgttcaacgattctaccttgatctaaaactaggatttgctcagcttgcttaatcgttgataagcggtgagcgatcataaaagtggtccgtcctttttgcaagactgtcattgctttttgaatgattgactccgtttcggtatcaacgtgactcgttgcttcatctagaatcaagatttttggatcaaataccaaagcacgggcaaagctgatcaattgacgttcgccactggaaaactcattgcccttttctacgacgggatgatggatacctttcgggtaacgcgtcagcaggtaaccggcaccaactttttctaatgcggataggatcatctcttctgtgattgacggatcattcataccgatattgctggcaatcgttcctgtaaacagatagggatcttgcatcacgatcgccatcgaacgacgaacgctgtgacggtcgaatgcttcgatcacttgatcatcgatcgtgatagtccctgcttgagggtcataaaaacggaacagtaagttcaagatactggatttcccagatcctgtatgccctactaatgcgactgtttcacctgcagatacttgaaaatcaatctcgtgtaaaacagcttgctctgggtcatatccaaaggttacttgattgaaagaaacatttccttctttgatcgcaataactgcttcttgctgtttttcaattggctgatcagcaaactcgaagactcgtttgccagcagctagcgattgctgaacattggtgatcgtttggaccagaccttcgattgggtcatagagtcgattgatataatcaataaaggcataaagcaaacctgcggagatagcgagccgaccatccaagaagaatgccgataatgtcgtgatcagaatcaggatcgttgaattccgcaaaagattgcccaatccccaggcaatactcgaatccaataacagatactttcgacctgtctgaaaccatttctcgacggtttcattgaattctttctgcagttggccttctctctgaaaggcctgaataactgccattccttgaacaaattcatttaactgaccactgatttgagaaatatattcccgcatggcaatattataacgggaagcatacttcgtatagacatgttgccaaatacccagaatcggaatcagaataagcatagccaatcctagagtatgattcaggaaaaagagtgccaagaaagccccaatgatttgaatgatattgctcatcaaattactgatgacgatcacatagaaattggagcgcaaaacttccgtgtcattcgtgattcgcgcgactactttcccagcaggaatctgatcaaaataagaaacgggcaattggtgcatatggtcaaaaagctggtcccgcattttcttcacaatgcgatttgacattttacgcagctgcagcaagctgatataacgaaagagcgagccaatcaaattgatcagcaagtaacccgctaataattggatcaagaaaaggatattcaaattccctgtctcaaccgatggagtcatgacgccgtcaatcaatcgtttggcaatcagcggtgatgtcaattccagtgcagcacctagcagtagcaatactgcaccgatcgaaaattgttttttgtaatagcctacataagacagcaggcgcttaatcgttgagaacatcttgatcgtcctcctttaactgttgatgataatattgctcttggtaccatccaggaactgcgatcagctcctgatgggtccctctttggataacatgcccctcttccaaaacaatcacttgatcggcgtccgtgatggcggataagcggtgggtcacgatgatcgaagtcggtgcatctgtcattgctttaaggtttgcgatgatcgtttgctctgtttttgcatcgacagctgacaaagcatcatccagcaacagtacatcactccttcgcagaaaggcccgtgctagcgacaaacgttgcttttgaccccctgataaagaaactcccttttcaccgactaatgtttcaaggccttctggcatccgtttgatgtcttcagcgaaacatgcgagtgataacgcttgccataagcgttcttcggatgcgtctgggtccccgaacaataggttttcgcgaatcgttcgtgaaaacaacgtatgctcttgcggaacttccgcaaagtgacgacgaatctcttctgtctgaaaagcagtcaaaggctgcccattgatcattggcatttgatttgaatacgggtaccgatgtccgaactgacgtagcaaggaagtcttaccactacctgttttgccgacgatccccaacacttctcctttggtaatagtcagatcaacgtcttgtaagacaaatcgttccgtattcggatatttgaaactgtactcagagaattcaattgtttggatcatcggtacaagttgttgtcctgtagattctagctgatcgccagtctgcaatacttcattgatccgacgccaagaagcagccccttgctgcatcacatttaccagatctcctgctgaaatcatcggccaaaccaccatcgttagatagacttggaaagataccatcgcaccaatagtgatttgttgattggctactaggaaagccccgatcccgaaactcatcacaaaactaatcgccaaaataattgtaatcagcggcccaaaacgggaatcaatctcggaaacgatgtcgtttttttcacgagtttctgttgttttttgctgaaattgctgcgtcgttgctgcttctaagccgaatgcccgtaccactcggataccatcgatgatctccaacacttcactattcatctctgaaacagagttttgtgcttctgtaaaagctttatctacttgcgaaccccatttgaaaatgtagtacgccaagaggggcataggaatcagtgcaatgattgtcaatacccaagagactgtaatcgccatcatggcaacgatgaaactcaaatagagactcgtattcaagaaaaccatcaacccatagcctacggtcattcccatgacttgaacatcgtcactagaacgagtcattaagtctcccgttcgaaaccgatgataaaagggagcccccatgtttaagaaatgcttcatcaattgctgacgcaattgcttttgcaaatcgtatgatccgataaataaattaaatgtccaaataaattctgcaatatagcctaaaagtatcgcaccggcaaacaagctgacatagcgaatcaaaattgccatcgtaaagtcatcttgaatcagtgcatcaatgaataagcgcaaaatatagatcggtgctacatacatcgcactggcaataaccataaaaataaatacgattgcataacgcaatttatgcgctttaaaatacgtcgttaattgttgtaaaatatatttcattttcttccctctcaatctaaaaaagtacacaaaaaagctctgccctttcggaaaaaggacagagcataacgtcaaaaaatatcgacactatctgtgtactaacggattaccgaataagggattaactactattttgttgtttgcgaattttgctgtaacgttttgcatcgtaatccctccttctttttttatttgctgactacaagtaacactttacagataactatgagaatttgcaagaatttttattaattttttttaaaacgattgactttcttatagtccttttcatcacttaatgataaaaaaagaccctttattcttttcccattctgaaagaattcttcttgttcttttttctcttttgtcttgataatccttagtctgtcaagacaaaggacgccattatttggcacaaaaaaaagttttttataatccgcccacaaagaaatctgcttccaaaaaaagacttcctgcatgggaagtcttttcttaaaaaagtttcgtttttcaacactttgttctttactattttaataatcgacaaactattactcgtttgaacaggcttatgaaggtcattttcgtctcttttttgccgcgctttttttgaaataggatgtccgataccagttcagaagatgaagaaatggggaacatccttttaggtcttaaataaaatgttcatccttcaaaaattccaatacttgatttttcaatgtatccgtatcagaagcttcctgacgacggttaggtgagaccgcaggctgagcgatcgattcgacggtttcttgtagagattctggcggcaattccagcaattggaaactatctactacaacttcggcaccatagacagattgtccttccttggtttcaaaaggacacatatgcaaatgtccattgattttaacacttgcacctttctgggtataccgcaaaaaagtttctgcttgcttgccgttgataacacaagcaaaccattctgtttgcaactgttcgcttgtttgccactgtgcagcgactgctaaattaaaccgtacacacgtattatttgctgctgcagaagccagttgttctcgactgggcatctcattaattttcccagtaaggatcaccttgttcgttgccacgttactccctcactctacattttatttagactcgcactaatgcaagattagccatagtctatcacaaaaaaaatttcttgcaattcttttgagaacatctatagtgatcttctacagtttttgtcgctgacttttaaacaaaatttaaccgagcttagccttcatcagtcgttgaatctatttcagagacatacgtccacgtcatgccattgtcttctgaggtaaatacgcctttgactgttccacctttgtaatcccccatgggaccttgattgaccataactttcaactttccatcttctagataaggtgcttcagcaaccacgaaaaccttcttccattcatcaggcatttcaaaagcagcttccagccacgtgtttcctccgtctgtcgtcacatagagacttggttctgttggcgttactccgccgaaactcataaagccaacattctcgttgaggtagcacgcgtccgtcaagagtcggctgattcccttagccacttgcttttcctgccaagtcttgccaccatcttgggtcacatatgagagatagccttcctgccccattacgcggccacccgataagaaaatgtaaccaaaaccgtcttggccaaatgtcaatttgcgaaaacgtacagctgctgtctgctctgccagagcaacattcttccacgtatttccttgattttccgtataagtataatagacattttgagttggactgccctcactagcatattccgttcggataaatccagtccgttcaggagtcaaaatatagctgccagcgatcagcgcttgtttgtcgccactatactcgccgccaaaaaaatcatctaacggatagggcagaatgatttgatgtttccagctatcataagttaatttcaattgactcttaccaatttctgttttatacgcaatcgtctgattcgtttcctttgaggtggtcatttgattgttcttatcggtgatcgcacttagatctcccgcatctacattcgtgatcgctttgtccccttgagcagtcgtagcaaccttaacttgccaacaaatgtcccgcacagaaccgtcatcggaaactttcccccaataagatgtcatcgtctcacgattgatcgacttgggccacacagtaaattttaccgtcagcagcccatcttgataggttgcaccactcacactgtaagaatcgatccgtacatcttcttgcaccttcacagaagaaaaatagcgcatcaaatcataaaataaattaaatccttgtgtattcggatcatagttaaattcgctttcaaagggcagaaattgattaaaataagtaacgggctgttctttgatagcggattggtttacttgagaagtctctacagttgatgattttgaaccactcgaactgaccgctcgtcctacagaaaagccaatgatgaaccagatgactagcccaatcacaatcagtgtcaaaccgacagctaacgctacccgaattgctgctatttttttatgctctttcacgggaaaaacccaccttttgttttcaattacttgaagtataatgaaaagtttcttttctcacaagatgctttttcacttcttaagaaattaagaaaagggttcctcattaaatagtttttagaaaaaataaaagcattcgcaaaaaagtgacatacttcaggctttccaaagatggaaaaactgaagtatgtcatttctaaccattctactgtttctttcatatttattcttatattgcttctctggtttcttcacacacgttgattaatggatcagattattccttcagataccttctaaacatctcctatcatctaataaatatgtgcgaacttgcgatacaaaatataatgaaccagtaataaaaagagtatctttcgatcccattttagcaacaatctccttaataccttgttgccactcttgataatatttaaattggctattttctcgaacaagatcttcttttttcaacgctttcgggtaatcgaatgtggttattataaggcaattattagggatttgctgcatctgtcggatcattttcctactatttttggttgttagcgctgaaaacaaaatatatttctttccttgttgaaatttttctgtaactgtatcaacaaattcttttatggcatgtggattgtgtgccccatcgataatgatcgtcggttgtgaactgattttctccatacgacctggccatcgcgctttttctaaagctttctgtatgctctctttttgtatcgctttgttttgctgctgacaataaagcaaaaaaagttgaagggcagttgctgcattttccacttggtattttccacataaaggaattctaagatttaaaaattgaaagtcttcattttcgaagtgaaacatttctccacttatagaatccttaggactatgactttcagggctttgcttcacatagtgaacttggtaagaggtatttttcttagagagtggcgcattttttttagaagcgacttcttcaattattttcactgcattttgcgaaatgtttcctgtaacaataggtatgttttttttgataatgccagctttttgcaaggcaatttcttcctcagtttcgcctaatatatctgtatgatctaatccaatcgtagtaatagcagttaaaattggtataaaaacattcgtactgtcccattttcccccgatacctgcctcgaaaattgcgatgtctgcgtgcttttgaaaataagaaaaggccattgcagtcaatatctcaaattctgttattccctgatagcgtgtatcctcatccatactatctaccagagggcgaaattcatttgctagctggacaaattcttctgcggagattgctttcccattaatcgaaatacgttcataaaaactttcaatgtacggcgaagtaaatgtacccactgctagcttctgcatttctaataaacaacgcaagtaagttaccgtcgaaccttttccatttgttcctgcaatgtgaatcccgatactattcttttcgggatgaccgcacagcttcagtagctcgttgactcgtatcaaaccaggccgcgatccaaattttttgcgcgaatgaatccagcgtactgcttcatctcctgttttaaacattcttatcatccccaatagaattgttagttcgtttagaaaatattacgagcgaagcgtttcaaaggaatcgcatgaccaaagaatacgatcatggctgtttgtacaggtagcatgatcaccgctttgacaatacgtattccccaaagtttcgtatcggtcaaaggaattgcatacatcattgacaaccaaattggtgtcagacacaaactgataattaatgtattgcaaagaacacatagaaaagaattttttattgtaatgggctttttataaaaaaagtagccataaagcaaacctgcaatgaatgaattcagtgtaaagccaatgaaaaaaggagctttccctaaaagagtattcccgataatatcagcaattgaagcaccaattgctgtccaccaagggccaaataaactagccataaccacttctggaacaaaatcaaaggtaattttcaacagctgggtttcaaactctaatacttgagacaaaacgaccattaatccaatcagtaatcccattgttgcgataatatgtgcgtctatttttttcttcattcttagcatctcctttaatagagctgctacacaattaatttatgcagcgaatgcaaagatagaatcgtgaaatttgtttcttcgtctaaaaggcaacatcccatccttatagcacttaacgctctatcttctactctgtttttttatttttgtcaaaacagcaatcctgttgtttgcaagattctgtttctctgatgaactagattccacttgtataaatgtttcatcttttataaccagcatttcatttttttgcaacatttgtcgctgtgtcctatcgcccagaagcactattgaaagattctccaatgcataaatgacagcaatagtctgcggtttaataaaatgcatctcatttcctttaagcgcctgaacaaagacgtcgtaatcgtctttaaaaataacattaaaatcttgacactcaccctgacacgttgtttttaatttaccatcgaaatggtggggctcaaaagcatttaggctaatccaagaacctaattgccctaatctaactggattatccaaagacataaggattcgttgataaccagtaaagtcagaaaattccacggtattcataatcactgtcgcagttgagagacggaaatcaaaatctcgtttagctaagctacttgaatcaggttccactaaaagttctgtagtctggcctccagaccactttgtggacaagtaatcttcacatgttttcttctcgattgttcccacacttcttccttaaacaatatctaattcttcaaattgactcaaaattttaatatcttgtgccacactgacaaaagccttttgatcaacatctttcatgatttgatccaaaatttccatttcgtaagtagtaataaccaaaatcagaatcgtttgagtttcttgattatatgcgcctagtgcatatggaatgatcgtgattccacgacttaatttttcttgcagagctgggataacttcattcggcttttgcgtaataatcgtcacctgaacttttttatgtttgacatacactagatctgtaacttttccacttataaaaatggataaaacactataaaaagcatagggccagccaaataaataaccggctaccaatacaatgactccattcaaaacaatcgaaatcacgccaatgcttcgaccggtgatttgtctgattgtaagaatgagcgcatccataccaccagttgaaagtccatattttaatgccagccccaaagaaaagccattgattgttcccccaaaaatggcgcaaataatcggatctgtagttagctcagtacttgggacgatgtggatggcaaatgatgcaaccgttacacaaataaccgtatagatgacaaacttgcgattaattttgaaccatgcaagcataaacattggaacattcaggagataatatataactgaaatagggacttcaatatggcttttagcaagaccagtcgcaatgatttgtgcgatcccagttaagccgccggcataaatattccctggctgccaaaaaagattcagcgccaaggaatataaaaaggcataaataagaatcactgttaattttgtaaccacctcttgccagatatctattcttttaaaacgtgacataatcctctttccttttctttaaataaaaggaagacatctcttcctctgatatcggtcaatcggcacaaatcaggtcatacctttaaaactgcagatccaatgtcacttgtttctcaatttcttttaagaaatctctatcttctaaaacggtagttgctttgtttaattcatcatacatttcgatgtctttatcatgctcaataaagtttacttgtcgacgaaatgcaagataagctgcttttgtgcctttgccaagtcctgactgatatcctttgatgtctagtgcttggcaagccgccatgatttcagttgcaacgacccgccgagaatttttgacgatttctagagctgttcgggcagcagttgtacccatgctaacaaagtcttcttgattttcacaggatggtattgaatctacactagctgggtgtgccaagattttattttctgaaaccagagatgcacatgcatattgtgtgatcataaaaccagagttcaaccccggatgtttcaccaagaacgaaggcagattacttaattggtgattcaccaatcgttctactcttcgttcagatacattgccaatctcagcggcagcaatacccaaaaaatcaaatggttgcgccaaaggttctccatgaaaattccctccggaaatcacttcaccatttctagaaatgattggattatcagtaactgaattaatctcaatttctactttttcttttacatatgcaatcgaatctttactagcaccatgaatttgcggcatacaacgtaatgtgtaaggatcttgaacatgatctggtgtcgcttccgtaatatatttactatcttcaattaaacgacgaatattacgagcggttgctaattgcccactttgcgggcgaatcgtatgaaggtcttctttaaaaggactagaaattccgtcatgaacttccaatgagagtgctcctgcaacatctgaaagttttaataactgaatagcatcatacgttgccaatgccccaaccgcgttcaaaactgttgtcccattgataaaagctaatccttctttggcacttaattgaatcattttcaatcctgctttttccattgcttctttcccagaatacaacgtgcccttataataagccttacctaaacctagtaatggtaaaaccatatgagctaatggggctagatcaccggatgctcctaatgagcctttctctggaatgtagggatggacacctacgttcaacatcgctaacaatgcttctacagtgcttaaacgaataccagaatagcctttaatcaacgaattaattcgaatcagcataatagctcgtacaatatcttccgaaaatggctcgccgtaaccagcagaatgagtacgaatcaaattttcttgtaattgcacagtgtcttcttttgaaatactgacattacaaagagaaccaaatcccgtattgactccataaacaacacgacgttcctctacaattttatcaacaatcctgcgcgactctttcactgcttctttggcactttcggctattacacattgacgatggttgcgtgctacagccactacgtcttctaaagttaggctagcaccatccaaaataatcatttcttgactaggaatggtattctgagcttcttcttttatcaacattttcatcgttttattccccacttttctaataaattccttccaagtatcagtttccacaagttttctaatttacttgcttcgatttattattgtttaagagtagatacaagatgcttgctactataactccaataactccagctattaaattgatcggattggccgcagcgaccatccaaatactaacaactatggagataattggaatgactggaccaaacggcagccggaaagcaggcacattttccatgtctttttttctcaaccaaataactgccaatgcagtcggaatgtactggaagaaacgaaagactacggacagttccgctaattgttcaaatgatccgcttagtagaaaagctatggttagtaaaccagaaaaaataatagcaacgataggtgcatttttattattttttttagcaatcaccttaggtaacaatccttcatccgcgattgaagctccatatcgcggaatcatcagagaatctcccatattcaagccagcaattgaaatcaaggccccgattgaaataatccatttcccagctggtccaatcatttcaacaaaagcatcttgaactggcgcattgctttgtaaaattcccgttccaagcatggcaatcgttcccgcaataatcataaaataaagcagcgaaacaatacttatggatccaataatcgcttttggcacattttttttggcattccgcatttctccagctactacaggtaaagcttcaaaaccaataaaagcataaaagacagtgagtgacgttgaggccatggctttagataaagtcatgtcaggattcaattgtagaaacggtgtaaagtttccttgattgattccatttttgatgaaaaaaactgcaatcagtgtgaaggcaataattggaatcaatttagctattgtaataacaatcgtaaaaatttttgaagtcttaatccccatactattaatcacagataagaaaataaccaaacaaatgctaatcaatgtattctgtccttctaacgctggaaaagtttggatcagaagtttcgcaaaacctgcagccattgcagcccacgcaataatcgtcacaaaccaccccagaacaccaacattaaatccaataaaatcgccaaatgctgttttcgaatattggaaagctccgccattcttattgaagtaacccgcaacttcggcgaagcaaacggccaacatcaaaaccaaaaccgcatctaaaaccattgcaacaagagaagcaggacctaaatcttggtaaatggttcggggcaaaagaaaaattcctgaaccaattactgcattgattccgtatagcgtcgcaccaccaaagctaaattttgcattctcatttttcgctagctctgcggagtcaatgtctttaatatccgttatctctgaaacctcgacatctttttgcatactatttcacctcttctttttttattgtaaaacgttttcaattacacgttttattctagtaagcagttcatgttagctattttacaaagagagttccctccacctccttgtaaaatagctctaaactgctagaataatccggttatatttcctttttcatcaatatcaattctttcagctgctggagattttggtaatcccggcatcgtcataacagctcctgtcaacgcaacaataaatcctgccccggcagatactttgagattacggatcatcacagtaaaatattttggcgctccaagtagtgacgcatcatctgaaaatgagtattgggtttttgccatacaaattggataattaccaaatccaagacgttccaattcctttaattcttttttcgcacttggtgccaattctacgcctgccccaccgtatactttttggacgattttatttagtttttcttcaattgaatcatccaaatcatagacatagctaaaatgatttggctcttctgctagtgcaactactttttccgccagctctttaccgccagcacttcctttcccccaaacatcagatagaacaactgcaacgtccatttctttacaagctttctctaccgcagctaattctgcatctgtatctgttggaaatttgttaatagctacaacaactggcatcccgtatacttctttaatattctctaagtgtttagacaagttaggtattccagcaaatactgcatcgacattttctattcctaaatcgcttttcttcacgccaccgtgcatttttaacgcacgaatcgttgctaccaaaacaaccgcatctggtcgtagattagctaaacgacatttgatatctataaatttctcagctcccaagtcagcgccaaagccggcctctgtcactgcataatcggcatactttagcgcaagtttcgttgccaatacgctgttgcatccatgtgcgatatttgcaaatggacctccgtgaataaaagcaggggcatgctccaatgtctgtacaatatttggctgaattgcctcttttaatagggcggccattgccccttctgctttcaaatccccagcagttaccggctccccatcgtaattatatgcaacgatgatttttctcagcttattttttaagtcagcaatatcgttagctaagcatagaatggccataatttctgatgcaactgtaatgtcatacccatcctcacgtggcacgccatttactcgtccttgaagaccatttacaatgtgacgcaattggcgatcattcatatctaccacacgtttccaagtaattctgcgagaatcaatttggagaaggttcccctgatgaatatgattatctaatagtgccgctaataaattattggcggcactaattgcatgaaaatcaccggtaaaatgtaagttgatgtcctccattgggactacttgagcatgtccaccaccagcagcaccacctttcacaccaaatacaggacctaatgaaggctcgcgtaatgcaatcactgcttttttcccaatggctgtcaatgcatcgacgagacctactgaagtagtggtttttccttctccagcaggtgtaggcgtaattgcggtcactagaatgagcttgccatcctcgttgtcatccaatgactcaatattattgatctttgctttatattttccataaagagacagattttctttagcaataccaattgattcagcaatttcttcaatcggcttcatcacaacagaatttgcaatttcaatatctgataagaccatgtccataaacttcctttctatctaccaatctaaatgattacagcgattcaagtatttgttgataggttgcatcagcaattttgctgccttcctcaactagcgattccccggctttgcggtattggcgaacaaacatttcgtctttgatgcttgcaaggttaatcaatacattcaaccacgcaccttgtaaagctgcctttaaattcaaagcagctactcccaaatcactagcagcattggtatttgatttgccaaccgcagcctgtgtgacttttaacgcatccacaattttttccatcatagaaaaaggtgtaacagctgctccttttaaagcactctgcattgcttctcggcgggcttttttttcttcttcggttgtttttgggagtccaaaaacagctgacacttgattaaaagcttctgtatcttcatcaattgccctgagtaaaccctcttgcaaagatttagcttttttttgcagtaattcaatttcgtcttcgaactctgcatatttttttttgccaatcgtgagttctgtcaccatctttgtcaaagcaattccttgtgcggcagctaatgctgaagcagatcccccacctggtgccggtgtatccgaacctaaaacagcaatgaaatcgtttatttgcatctcaacgagtttcatgacaatccccctatcaattcaataaatgattttcgaaaacttgcttattataattgaactcttcaatctgtaaataatattcagcacaatcaatcaaggcttttgctggcgttaatccgattacttcactgccaataaccgacacaccataacgttttgcttcaaagcgaatcgtttcaaacacacgatacagcggtgttttctcgaagttcaccatattcatagatacttgagcaatattacgatcttcaagcatgacaccaatacccttgcagtatttccatcctccagaggatccgcgaacaattttagcgattttattggcaatctcaatattatctgtatccaaattcacattgaatgcaactaaaggcattctggcacccactgctgtgacaccagcggttggatgaattttgcgttcgccataatctggttgccattcttcttccaaaagtttttctggcattttctcaaattgtcctttgcggatcttcgctaaatttttacgtacgggtgtagtggctgaatcttcatatagaaaaatgggaatctgtaattcttcattgattcgttgagctactttcttagaaatagcaatgcactcttccatggtgacatctttgatcggcacaaaaggaaccacatctgttgcccccatacgaggatgttctccttgatgcttcgtcatatcaatattctcacttgcaaacttcactaattgaaatactacttcttggattccttcttcatcaccaacgagtgtaaaaacactacgattatgagatgtgtcagaagaatgatccaacaatgtgacacctttaacattcttagcgatctccaccaacccatcaataaccttttgatttcttccatcactgaagttcggaatacattcaattaattttgtcatggtctattgctccttgtttttattttgaactttaggtacggcataaatttgttcttactacattaaaaaaaatctatgaatagcgttatttttatttcaacacctcctaatatcccaatttatttgttaccgctttcattcaccgaaatcagcttatcactctttcaaatcggttgcaaactccgtaaaaaaaagcttttcataattttttcataattaaaattctgtttttttttggaaaattctcctaattgtcttccgcatttttttgtcttttattttatttgacctttttttgactttcttttttaaactgaaggtaacctatcgttgcgcattgaataaaaaacaagacagactttatttaatctttttgatttcttttacaaagtactttttttgcttgaataggtacactcataaacaaaaatttgtaatcaacacataaaaaatcttcaagttttatttttgacgtttaatagtcggtgcccttcgttttttatacataaacattagaaaaaaataattattatgccgataattcttttgaacttttggaaaattatcagcaaataaagaggtggaaacatgaagaaaattgttttgttgattgattttggcagcacatatacaaaattaactctggtcgatcctagcgccatggaagtccttcatacagctcagattcccacaagtagtcaagacgggttacagttgtgctatacagaagggaaaaaagcattacttcaaacgttaaaattttctgatcaagtaaagatagaagaatatttctgttcttccgcatggggaggctttaaaatgattgccattggtttaactgagagtttgacattagaagcggcgaaaagagcggctctgggggcaggcagtcgtattcttcaaactttttgttatcgtttgacactggaccagcttgaggaaatagaacaacaaaagccagatgttgttttgttgacaggagggtgtaatggtggaaatcaagaaatcatccgtcacaatgcccgtcttcttactcagctttctacagagattgcattgattgtagctggcaacgaagacagctatggagaattatctaagctcttgcaagatcgaaataatacttactttaccgaaaacgtgatgcctgatgttaataagctgaatcctattccggttagaaaaattgcccaaaaagttttcttagaaaaaattgttcattcaaaagggattcatcaagttgcagctcacgcaagtgcccccatcatccccacccctaaagctgtattagctgcagccaagctattaaaagaagggacacaagcttcgaaaggttttgggaatttagtcgttgttgacattgggggagcgacaacagatattcattctgttggagatggtttaccccaagcagaaaatgtttactttgaaggattggaagaaccctatttgaaacgtaccgtagaaggtgatctcggtatgcgttcttctgcagtaagcttgctaaggtgcattgtagaagattccaatcgaatcagggcattgtcttcttggaaatttacgactcttcaagctgcttgctattatagatgtagtcatccaacatatgtaccaaagacacgagaagaatgcctaattgatcaatttttagctcaatcggcaacggctatcgctttagagagacatgctggaaagataagaaaagaatatacgccaaatcgtacaatctactaccagcatggaaaagatcttcgaaatttccaaacaatcattggtactggtggcgttatcattcatagtcaatctcctaaaaaaatagttaaacctgacatcaagggcatgtctaatactttgctaccagtagatccgcaaattcttattgaccaagactaccttttatctgcaatgggacttttaagtcaaaactatcccgaagcagcattgaacattctaaagaagaaactttatcgactcaacccttagttgtgaaaagaagctgtgacaaaagttttgtcacagcttcttctgaataagcggttagtaatagctttttcggaattttcttctcatttcttgaaactgatcacatctgtcacagcctcagatatcaatcttatagatttacatgaaagaattcttttaaaacttgcaactcatagcggtctcgatattgactaaggttgtccattgcttttgtcaaatagtacgataaatcttctttaaccaaatgatttaattgtagatttgcatgcctctcatttagacacttttcttttaccagtgctttgataaaataaacgagaccactatcacgcggattagctagttgattttggtaacagcttgtcttttcaataaactctatcacttttccataatcttttttgtgaaggtaaattaatgttaaataagcatttaactgaacccttttccataatgaagtagtaacttcaaaatattcatttgccttgagaaaataggtttccgcttgatcataatctttttttgcatacagtgtaattcccatatcaacataaaaaatagccaagctcgtcaccaaattatttccttcacacaaattgatggctttttgttgcagtttgatagactgctcatagttagaccgcaaacgctggatttctgctagataatcatacgcggcagcaatattgctgttatacttttcgtcaaaacggttggcaatattaaaaattgtaatcgattcttggatgtacgattctgcttgatccaaatcaccgatcatcagatgatacaaacctttcaatcgcaataaaataccgatagattcgttgttattggcagtaattgctacatccattgccaaatcgatataatgtgccatgtccgtcgcattatcagtttgaatatagtaataaatcatttgacgatacccgcgcaataaataggttgttagatgaaagtctttcgcttttacgattactcgctgaatgttttcaattcctcgattatagtccccggaattgatgaaaaagcgaccttctagataaagaaatctgacgagcaacaactgataagtactatcttctgcatactgtccttcaatttctttaagtcttgcacctatctctttgaatttttctaattcatttggggcttctcttctgaccaattcacgtgatgccaaatgttcttgatgatagattggaaagagttcatgttgaatacgtaaaaataattgatgatgagaaagttcataatctaaggacttaagttcttgatgcgcctgacgatagtgatacccgattgctgccaataattcgctatcgttttttgcttcatttaacttttgctctaataaaacagcaattttttcatgtatcacacgtaatttcatatctgattgttgtgcataaataaattgtttcatcttattatgtttaaaactaaagcatacttcatcgagataaatattctcattgatcaatccttgcttgattaaattatcgagcgctttataaacctctgctttttgaccatcgactaactcaattagtacactcataaatgctaatttctgaaagaaagaaatcaagtcaatcaattccacttctacaggcaataagtttacaaactgtagactaagcttatcctttatgttttgcgttaatctttccaatgtgttgctctcttccaattgatttaagtactcactaatgtacagaggaacaccttctgattctctcataataaaatctattgtagatgtttggaacgtatgattaggcaattgtttctcacaaaaagccctgacctcaaaatcttgaaatggaagtaatttcaatgtgataattttttcatagcggcgaacgcttacgataaagtcttgtatttccttgcgaaagcttgattgcaatgtcatgataaaaatgatatcccgatgggggttatgcagaattaaactcgttaatagcctaatactggttcgatccatccattgtaagttttcaataaaaatgacaacaggagttattttccccaactgttgcaaagcttccgatatgcattgtgctaaaaaatttaactcaacagaatcaatggaccgaagtacgcgttgtgctattaaatcattaaaaaatggaaattgttgactaaatgtttgttgccattgactaacttcagctagcttttctctttgcaataaatggatgatctgttgcagtagttcacgccatggacgcaagcaatgctcttgttccgttttataacaagtcactttgaatagctcataaggatattgaatattttctatgactaattgacacaatgaagactttcccacacctaaatctccagtaactaagaccgattgaaatggctttttttgttttaaattcgccaaattcaactccaagcgctccacttcattggatcgaccataaaagtgattcgcgcgttttttttgacttactcgctgtttttgattggcaatctgtaatgttctttgatagagctgttttgtttcttcacttggttcaattcctaattcatctctaagtgtctctaccaattcataataggtttcaattgctttcccattgcgatgattttcaatataaaattgcatcaataattgataattgcgctcatcaaattcatcaattgcaattaattttctgatatttttttctacatcggctacggcatgaaatgaaatgtcttctgcaaccttttgatagcagcattcaataaattgatgttcatagagattacgcatcttagtcaaccatgcatcaaacagatcggaatctttcaaataaaatccttttaaaaattcatcccgatagtcttccagatgagcataagcatccttttcaaaacgatacgtatcactctcaatgattaaatcagaattaaacgtcaaaatagatttattcggtgaaacaataaattcccctcccaacgagcgatttgcttgataaattgtatttcgcaaattcttcttggcacttttttcatctttactaggccataaaatacctgctatttcatcccgactaatttgtttgttgatcaccatgtaatacagcaaagcattgatttttgaaaaagaaaaaatttttatgttcccatccacttttattgttggtgttcctaataatttaaacgacaatgtatgctccatcactgctccttctttcagttttactaatctttattttaaaacaaccaacctaataaagataccgcttacaacactgtccattataaccttctaaaccttctaaaccttttataagaaaaactctctaactctatcactagaattggagagttctctgcaaaaagatttctaactatgctgacgttgcgagacgacaagatctccagccttatatacatgtgtaaccaaattagtcgcaaaaaaatacaatggaaaatcgatattcggtgcatcaaaaatagtaatatctgccgattttcctttgtctaggcttcctacgctctttgatcgacaaatagaatacgcagcattaatcgtaaccgcattaaagacttgaattggagtaagcttttgcataaagcaacctaactgcataataaactgtaaatttgctgttggacaacttccagggttactatctgtcgttaatgtaattgccatacccttgtcgatcatttttcttgctggtgcatacgtgtcttccattaagctaaaggtggttccaggcagcaaattcccgataactttggcttcgctcaactttctgattccttcgtcagttatcatcattaagtgttcagcactaactgcacctaactgtgcagcaatatctactcccccaatcgatgcaatctcgtccgcgtgtatacgtaatttaaatcccatttcttttgcggcttttaacaatcgataagattcttcggcagagaaaaccccttcttcacaaaacacatcacaaaattctgctagtttttctgcttttacttttgggagcatttcatcaatgattaaatcaataaactcattagaacgtccctgatactctgctggaatcgcatgagctcccataaaagtagaaacaatatcgattgcatgttcgttattcaatttttttgcaacttccaattgttttttttctgtttcccaattcaatccatagccgcttttagcctctactgttgtcacaccatgcatcagcattttatccagcagatctgcagatttattatacagcgtgtcaaatgaagcttgtctagtcgcattcattgtacttaaaatcccaccaccatcagctaaaatctctaagtaaggcacaccatttaatttcttggcaaactcatgctctcggctaccaccatatacgaggtgtgtgtgacaatcaattaatccaggtgtcgctagtttccctgtgtaatcaataatttccgtatgtttatcaaccaaatcattgtttggctgtccttcccctacgtgcaaaatctttccatccttgatagcgatatagcctccgttgatgattatcgcttcactcatctgctttcctctcaatggtgcaccctgatcaatcggacaaaaaatttgactaaaattgtttaaaattttttctgctttcattattcttactcctctacaaattattcatattctgagtataaaaaatcatagtctaacagaagtcaaacgatgcgtctcaaccatttataaaattggaataaaattatttgtgcggatagacgtttcgttgacaccgcttatatatactgagaatcgtaagccgattaagaatattttattcattcaccattattatacacttgaggaggaaatattaatgattcaattacaagacatcgaacaagcgatgacagttaagttagatgactttttacctgaaaaaactatttttcaagaaggcattcgccgcgcacctgatcgcggattccgtttaacaaaagaccagacagaactcgcattaaaaaatgcattgcgttacattcatccaaaatatcatgaaatcgtgattccagaatttatagaagagttaaagacacgtgggcgtatttacggttatcggtggtatcctaaggaaagaatctatggcaaaccaattgatgcatataaaggtaaatgtactgccgcaaaagcaatgcaggtaatgattgataataaccttgattttgctgtggcgctttatccctacgaacttgtaacttatggagaaactggtcaggtttgttccaactggatgcagtatcacttgattaaaaaatatctcgaaatcatgacagaggaacaaacattggtgattgaatcaggtcaccctttgggccttttcaaatcaaaaaaagacgctccccgtgtgattatcacgaatggattattagttggggaatacgataatattgatgactgggaaattgccgaagaaatgggagtaaccaattatggacaaatgaccgctggcggctggatgtacattggtcctcaaggaatcgttcatggcacgttcaatacccttttgaatgctggtcgtttgaaacttggaattaaagatgatggcgatttagctggaaaactgtttgtttcctctggacttggtgggatgtctggcgctcagggtaaggctggagaaatcgccaatgcagtggcaattattgctgaagtggataagtcacgaatcgatacaagattagaacaaggatggatttctaatcttgcggaaactccagaagaagcaataaacattgctacaagctatctaaataaaaatgaaaagacttcaattgcctatcacggcaatattgtcgatttattggaatacattgaccaaaatgatgtaccagttgatttactatctgatcaaacctcttgtcataatgtgtacaatggaggatactgccctgctggcattacgtttgaagaaagaacaaaactattagccacaaatagtgaaaaattccatcagctagtggatgaaacattgaaacgccattaccatgtaatcaagtcgcttgttgcaaaaggcacctatttctttgactatggtaactctttcatgaaagcaatctatgattctggcattaaagaaatctcaaaaaatgggattgatgataaggatggcttcatttggccatcttatgttgaagatatcatgggaccaatgcttttcgattatggctacggtccatttcgttgggtgtgcttaagcggtaaacacgaagacttggtcgcaacagatcatgctgcaatggaagtgattgatccgactcgccgttatcaagaccgagacaattacaactggattcgtgatgcagaaaaaaatcaattagtcgttggtacacaagctcgaatcttataccaagactgtatggggcgagtgaatattgcacttaaatttaatgaattggttcgagaaggtaaaattggtcctgttatgctaggacgtgatcaccatgatgtttctggaacagattctccattccgtgaaacatcaaatattaaagatggaagtaatgtttgtgccgatatggctacacaatgctacgccggaaatgcagctagggggatgtctttgattgcactgcataacggtggtggtgtcggaattggcaaatcaatcaatggcggttttggacttgtactagatggttcagaacaagtggacgagatcatcaagtcagcgattgcctgggatacgatgggcggagtggcacgtagaagctgggctcgaaatgatcacgcaattgaaacgtccattgaatataacaaaatgaatcaagggactgatcatatcactatcccttatcttgcagaacaaagcagcatcgatgccgcaatcaatgcgctttttgattaaatcaaacacggattattttttcccaggaactgtgatataagtactttttaataaactaaacatctgaactgcatgataccatttacggtgaagtcggtcttcagcacaatcataagagaaagacaattcatcattatagagaacggataccttttggctagtttatacttctgtcacacttccttttttaagtgatctactgaaaggaagcgaaccatgtacgcaccagaagaaattgttgaaatagcaatcaaaaacggggcaaacaaaacaaaaaaaacactaatagcaaaatgtttgttaggctttattggcggtgctatgatttctttgggatatttagcttatatccgagtatccgcccccataccatcaaacttttccggattagggacattgttaggatcagcaatttttcctattggattaatcgtcattttactagctggcggggaattaatcactggaaacatgatggctgtaacaattgccttttacgatcaccggatttcttatcagaagcttgtaggcaactgggtattgattacaatcacaaacatgattggagcaatttttgttgcctatttttttggttactttgttggactgacgcatactgatgtctttagagaacaggtcataaaaatagcgcagcacaagctaaacacttctttttcacaagccttcatttccggtattggctgtaactggtttgttggactcgcattatggttatgctacggtgcaaaagatgcggcaggaaagattctatctatctggtttccagtcatgattttcgtggcaattggattccagcatagtgtcgctaactgctttgttattcccgcagcaatctttgaaggagaagctacttggaaagcgtttgttttaaattttatccctgtctatctaggaaatatagtaggtggtgcagttctcgtatctggattttattatcttagttattcagcaaaaaatgctactaccaaagataactagcacagaataaaagaagatgaacatatgtatcctcaatacgtatgtttatcttctttttaagacgtattcctattcgttattttccactataaaatagttcagcacctacttcgcaaatgcatcttgccctccatacttattctggtggatgatctcactgatcaagtactcgtagatggaacgcggaatctgtacaccatcttgctttgctttctcaaactgtagttgactgatctcgcctggataatagaccgttgattgtccttctacaggcggaatttcatgtaattcatttaccatttgatccatctgttctttaaatgccgaaagatccgtaaagcgtttgggatcaatgactagaaacatttgtcctaggcgtcttttttcagtgagatcggcatacatagaagatacatgtttcccgaaaggcagtcctaacagtgaaccggctaaaatatccaccatcatcatcaagccatagcccttggcgccagcgatcggtaataatcctttaacgtccgtaggatctgtggttggttgtcctgtctcgtccactgcccaattttctgggatcggctgatttttggctcgggcatcgagtattttgccccacgcttgaacggtggtagccatatcaaaaacaatgggttcatgtcccgctcgtggcgcagcaaatgcaattgggttcgtgccaaagtaattgcgggtaccgccaaagggaactgccattggatctgattgacacatcgctaatgcgatcaactcttcttctgccgcttttttgacataataagccatggtaccactatgactggtttgttcgacaccgacataggcaattccagcttctttggcaagatggatcgcaatcttcatcgcttcattacagacgtattgtcccatgccattgtcgccatgaaaaatccctgtagcagggccggttttctcaaaagataatttaggcgccaatgtgattccgcctttagcgatccgttcggcataatagtccatgcgtacagcaccgtgggaatggacacctgttgcatctgcaatagctaaatgtttcgccgtttcgctggcagcttcttgcggcaacccagcagcaatcagttttttcttcatcaattcttccaattgagtaatagaaagagtgactagttcttccatcgtgaatcctcctttaacaataaaggagaagtacctgatagtgacaacagcgacttctcctttctcttattgattaaatatctgatagtccaattcatccgcagatttcgcaatgatcatcgcagaataaacatctgaattgacattcaaaatcgttcgcagcataccgacaaaccattctacaccagcaaaaatcgcgatactctcgattgggagtcctaattgagggacgacaatcgccagtgaaacgaggccagctcccggaacaactgcattcgccaaggacacgaatgttgcagtgacagccactgtaatcatttgtatcaaatcaaaaggcatttgatacatctgggcaatcgtcatcactgtgatcgccatatgcatcgcagaaccattactatttaaagacattcctagtggtaagactagatttgtgatacggctgcttaatcccagcttatgttgggcttcttccatagcgaccggtaatgtgatggcggacgaggtagtcgctaatgccataatggtcatatttttcatattttggatcaagcgccatggattcacgcggcaatagatcatcaaagcaacaatccataaggcaagaaacgtcagtgtggctaacccatagattagaagatactttcctagaggtaaaatgatctgtaaccccaaagaactgatcgttgaagcaatcagcgcaaagatcccgatgggcgctaaaatcatgacatagcggatgatcgtcagcacgacttcattcaagtcaacaatgattgttaataattgcgactgcggattcttttgcaaaaaacgatttaaagcaatcccaaaaaacagggcaaaaacgatgatctgaataatcgatccttttgacaaggcatcgaaaatattggtaggaataaaattgatcagcgtctccgatggtgagatttcttgcgcttggacagtgtcagcagccgtttgtgaaaaatcgatccctttaccaggggtaaagaaaactgccattgcgacaccccaagccgcagcaagtaaggaggaaatcccgaagaccgcgattgttttcccacctaaccgtgtcaattctttgggggcaatgcccccaacagcctgaatgatttgccctaagatcaataccggtattgccatttgcatgagccgtagaaaaatatcgccaacgatttttaagtgaacgcccgcttgtgaaaacagcaatccaaaaacgatccccaacaaaacagcaataacgatttgtgtgaccattggtattttttttattttcaccttgatcccctctttatttgcggagtatagtccctacctgttgatcaagtacagctaaattttcaattgaagtaatgatcgctgtccttgacgcatcctcgtttacaaagccgatggctgcctggatcttcggtaacatactgccagcagcaaagtgtccttcttcaatatactgttctgcttgctcgacagtgatttctttgagagcttgttggtctggttgattgtagttaatgtagatattatcaacacccgttaaaataatcagacgatctgcttggacattgtctgccaaaaccttggctgcaaaatctttgtcattgactgcttccacgccaacatagtgctgattttcttgataaacaggtaccccaccacctccagcacaaatcgtgattaccccggcatcgactagggtcttgatcacgtctttttcgacgatttcttgtggcatcggagaaggaaccacttttcggtagccccgtccggcatcttcttgatagacacccccggttttagccatcgctgcttccgcttcttctttatcataaaaaggaccaatcggtttcgatggtttctggaaagaaggatcgtttttatccactctgacttgtgtgattaaagaaatcacggattgcggcacatcccgttgggcaaattcattggttagtgcatgttgcaaccaatagccgatacttccttgtgtcatcgcaacacaggtatccaatttcagctgtggatttttttcgctttcagcagctttttgctgaagcagcaaattaccgacttgtgggccatttccatgacacaaaatcacttgttcgcctttttcaacaaaatcagcaatatatttggctgcttgagcaactaccgctttttgtccactatcactagggtctttatccaaaatggcatttccgcctagtgcgatcacatttaaactcattttactgtctccttctcattttccttcgctaatacggcaaatattcctaatccgatcagcagcaacacacacgataagtaaaaaccgacttgcattgatcctaatgaatctgctaaaaatcctgtgacatatggcgcgaggatcgaaccagacattccgatgaagttgtaggcactaagcgtcgtgcctaacgctccggctggtgcatttttcgttacaaatgtcaccacgattggatcaagagcaagcttgcccgtcaatccatacaaaatcaacacggcgatcaatatcgtgcggtctgtaacaaaggcaatcgcaaaaactgaaagtgtcgcaaggggtaccaagaaatacaccagttttttcgttgctcctgttttgtcgttcaaccgagcaaaaatcaaggcaccaggaatcgaagcccatgggacgagagaagcaataaatccaacacttgctccttcaaatccacgttctgcgatcaaaaattgtggtaaccatgtaatgataacaaaatttgcataaatgctagtaaaacataagataaaggcagccactaaattacgattagaaaaaatttgtttaagagagattttttcttttggtccttcttctttaaccactttttcttcatcttcaggacggatgactttctctttcaataccgtgtaaaacaagataccgagaatcaatgttgggatcgccatgataaagaatggtttgctccaatgatcgccattatccaaaacaagtttacttgacaatagatacccgccagaagtcccaaaagccattccgctgttgataatcgcattcccaacggttcgtttgttatctggaatcgcttctgttgataacgcgtattgaggcccataatacgcaccttgaccgataccggcaactgcgcgaatgactaagaacaagacaaaactcgtagctaatccactgaaatacgtggtcacggccagcagtacaaaaccaatggcaatgactagctttcgaccgattttgtccccaacgatcccaaaaggaatttgggctttagctcctttatcaaagaaaatcagctggaacgactgcagcaaagcattcccccaaagttgtaccaaatgtcagaagaagacgaggaattattcactactttctatactttttttatcagcaaccgcaattacaagaaaactgccgaggctctttttctgcattcgaaaacgattcgctatcgtctcaacaaaatcgagcagttgctggagattgatttgacaaatcctatccaattggtcaattatgaaatcggtacgtatttattagaattgaagaaaaggagtcgtttataaatgaaaacagactttttattatctaccggtgcctcagttagtctttatcctgctgattccattgagcaagagagctatctgatttacttgcatggcggtggattcgtttacggcagtcggcaggatattcccaaaccattgatcgaattgtttcatgaacacaactatacgatcctatctatggactatttgttggcaccaaacagttcactttctgaaattattgccgctacctgggagaatttcttggaattaaaagcgaaagtaatcaaggagcacccttatcgaatctgcggtcgttcagcgggagggtatttgatgatggcattgacgaaaaaaatttttgctgaaaaactgccaatgcccgaaagcctaattaacttttatggctatacagacttagctttcattgaaacttctcgtcagacgactcaaccaccattgtctgagtcccttctgccgaaaatcgagttaacagagaaagtatgggatgatccccagtttcagcgttatctcttttatatttatgcacttcagcaacaaaaattgactgaggtatatggcatttcctccaatcagttgacggattatgcgctcccagcggaagagctacaactctttcctcctgtttttagtacagccagcagtaccgatgaagaagtcccatttcgctatagtaaggcattaaagaaaattccagatagtaaatttatagctgtttatgacctgccgcatgacttcctgaaagaaacagatgatgaccaagtccaaatggttttttcccgtttaaatacctggttaaatgaccactgacaaaaaaactaaaacaaaatcatttttgacaggcagcagagtgttataaaaagaaccctctgctgcctttgatcaatttttcttctctttcaacttgaaaatcagcaaataatgcttacttacaccaagattgctggttacatgctatactaaaaatgattatttgaaagaaagaaggatgaatttaatggaatttgtgggtatcttatgcctaatcctcctcacaacaactcttttctctcatatagcaagacggattggcgtccctgctgtaattgggcaattgttggctggtgttttattaggaggtgcaggacttaattgggtacatccagacattttagtacacgatttttctgagatcggtgttattttgctaatgtttttagctggtttagaaagtgatatatctttactgaaacgctattttcgccctggaatgtttgtagcgatcttggggatcctcttcccgatgttattcggctatctcacaggtatcggatttcaaagcagcggaacggaagccttcttttttggtattgttctagcagcaacttctgtcagtatctctgtcgaggtactcaaagaactaaatgttgttaataccaaagagggttcgacgattctaggcgcctcagttgtcgacgatattttggtcgttttggtattgagcctcagcctttcctttttgggaggttctggtacgcaaagcacccctttgcctgtcacactatttgtagaacttatttattttgttttgatcttcttacttgttaaatggattgcgccgttcttactttctttagcagaaaagctctttgccaatgcctcagtcatcatcatgtctctgatcatctgtttaggtatggcttatcttgctgacttagtcggtttgagctctgtgattggtgctttctttgccgggatcgctgttagccaaacaaaagtcaaagaagaagtggaacacagtgtagaagcattgggatatgccgtgtttattccagtattctttgttagtgtcggcttagaagtagacttttctttgttgaatgagcaattactctttatcttagcctttacggtagtagctattttgactaaacttgtcggaggttttgctggcggaaaaatcgctcagttctccaacaatagtgcttggatggttggtgcagggatgatatctcgcggcgaaatggctctgatcattttacaaatcggacaacaaaataacttgatcacacctgctctttattcacccttagtaattgtggttttattgagcacactgatctccccactgattttgaaatattttacaaaaaaaatctattgatgcatcgtaaaaggcaaaacaccttctcaattcagttgagaaggtgttttattgtatttaaagcaaaaaaacattacaataaagctatataggatcaaaaggccgacaacacaccgtgaaagggcgtattctcatgaaaatcatcaagaactccattgaaaatcaccaaaagaaaaaagagcaaaaaaaactgattttaagaaaaaagaactttgaattacgtgaaagaggaaaagatcctcataaagggtggcaccccatggtcgataccggatccggcggtgcaaatggtgcactcgttaaaatcaatagaggcaccatcgatattaccggaaacaatgacgaaacattcaactattttttagaagaacaaagacgagttgctgatcattcaaaaaggcagaactaactcttgtttagaatgactggcaagagcacttttcaactgcttctacgataaatactattcaatccagacggtctcaatcagtaaatataatagtcatcgcttcctgctggatagatctcgatcactaatttatgaggcaaacagatactggtttgtccattttgagagatccagcccgttttaacagcaatctgatctggactattgtcttctttcacgcgaattttcccgttatttatttcgataatattatattgttttctagacggagcatacgtttttgtcaatgattcaatttgttcgagattgaatcggtcaacctcctgcccgttgattcgaacaatggcgtaacgatcacctgtatgttccgtagcttgggcagagaaaaagactggcagaaaagatcctacaatcaatgcagcaaagaggaggtaatcaaagggttttaataaacgaataaaagaatctagcagcctcattcgtatcacctctttctttttttactgttttttctttaaaacagctagtcgtctagttatgtcctttgctgatttcaataattgaataaaaaggcattggcaaaaatcacctgattttgccaatgcctttttattgaatacaattaaaatcataaatgattggttgtgctcatcatgcgtttcaatggatgcttcctgtttttgcatcattgtcagctgtggctacttaaatcgtttcttttttaatggtttcaatcatttgatcgattgcttgtttgatttcatcttctgtatcgggtaatttgcttggtaccccatcatgcttaccactgtcgacttctccggaaaaacttacttcatcccctgaaacattgatttggtcttgatacccttttacagcgatataggctttggcaagcacctcagtttctttcacatcttcaatttttttcattgtacttcccctcctgaatcttattgtagcaacttctatttaaaaaccaaattgatttgctttgtttttcccagttttaatatctccaaaagaaaaacgaaagtaggaagggctatttttcggatggaaaacaacaccgtttttttgttaaagtatttgcatatcttctattgaaaaaagcttttttcaattgatctttctattcgatagttggttctgataatctacggtcttcaaaataagccgataaatcaatcaattcatcctctgtaaactgattcatttctacttcacctaaaatcctttcttgcagtgttcgatccatttcccagaaatggtcgatctttttgaaatggtcagccgaaaacctggcaaatactggataaagaatcaagaagtcagtgtatgtcaggtccatggactctgtataatcctttacgtaacctgaatctaatgcttctttggttggttcaccctttggcccaatcaatcctttgtgatataacagctgaaaaatttctgctttagtgactgtcggatcaactttctttttgtagcaataagcctcttcaaccaatgatggatattggatcatcattattctctacttcctttcagtcatttgctttcgttatgatcggtttcttcaaaagatattcctttaatgacacatggtgacttcgtgtataattcccactggtactgtcaaaatggatggctggcttcttcaattgttgatttctccgccgccggtttttctttgcctttgaagtttttctagctggtactgccattttttaatcctttcttggaaaaatagtttcgttagctaatttttttcttgttccgcttgtattcatggataatttttagcgcacgcttgcgagtcttgatatttggatttttcaagcggcgataagcacttgccagatctgttttttccaatcatttttcctcctttatcgtcctacttctctctttaagattcatctgtattctttactcacttctttatttcacgaaaaattgcttttcgccgtagttttggtgaatatttttttaattccaatcgatagggtgtgttgcgctgatttttgctagtcagatagagtcgttctccggtttctacacattccaatataatattattttgcatcctcaaactccttccaaaaatctcttcaaaaacaaaacgtaacgattacgttttaaaccttatcatagaagagtagaagattcaagaagttttttatatttttgttattttataaatgaaagatgtttcatatgagtcgttgatcgtttctgaaaaaaattctatttaataaaataccagaaataaaaatagctgtttctctctttaaaaactttgatttaacaaaaaaataagatacccgcaagctggtattttagaacaacttcttaaaaattgttctagtaattatccaatactttactggtatcttgttttttattattcgtgtgtcttcatccattccgtgatagccgataagcgttcaagacgtagattgggcaacccgctgcgagaaaggccatgactagaatgcggaaagaggatcaatttcgtgtcaatgtcattccgttttaatgccgtataaaattgttgcccttgttcttgcggacaacgcagatcattttcgccatgtaaaacaagcgttggtgtgctgacatgatctgcatacgctaatggtgacatttcccagagtgtcttagactcatctaggtcatgcagcaactgatattttacgaaaaatggtccaatgtcgctggttccatagaaactgatccaattggagatcgaccgctgtgtgacggcagagcagaaacgatccgtgtgccctacgatccaattggtcataaagcccccataactaccgccaacgacatgaattttttggggatcgatctctggatgatgattaagcacgtcatccacacctaagagcaagtcttggtaatctttattgccataatctcctaggatcgagcgaacaaactcctgaccatagccttgcccaccgcgaggattcagcaatatcactccgtaaccattggctgcatgaacttgcatttcgtgaaagaaagtctccccgtagcaaacttgcggtccaccgtgaatatataaaatcgcagggtgctcttgactggtctcgatcggtggtagataccatccttggatttgccaaccatctgctccctcataccaaaaacgctgcggttcactgatcgacagttcattcatcagagcttcattcggatcagctactagttctagctcgccactagttaagtcaagcaccgctagtcgacttgggatcgttagtgtcgaataagtgattgctaagtgggtttcatcaatctttgctgcatcagtgatatccattaattggtcaaatagtaatgtccattgtcctttcgtatcgacacggtacaattgcaattttccatgagtagtcactggtacaataaactgttgtttgttgatccaggttactgaaacaccacgatttttttgttgaaaatcaccgatgatcgtattgccgatggcaaggtcttgttcatttgagaggttgactacttcctttgtttcaaggtccatgagataaagatcttcctgggtaacaaatccataggttaggtcattccccaaaagcagcaattggttgccagataaagcagcaaaagaataagtcccttcaggcagatcagattcaaatgagtgatgctgattcgttgtcagatcatacgcatacagcatacttccataatgccattctcgttcgggtttcgtctctgcggtatagagtagaccttgctctttttccatgattgcttcaagatggatttccagatctgtttcaaaaatagttgctgattctttcgtcgttaataagactttctttacgcgcgtgattttctcagataaaaagcccgcaccatctgcttgatagcctaatttggtcgtcatttttattttaggaaaatcgttttcagcagctttttcttttgacgtatcgtattttttctcagagtcatccactcgttcttttgatttatctgctgagacttgataatagaccgctgtagcatcgtctgtccaaaaataattgctgattccctgctctgctactaagacagaagctcgtccaccgtttaacggcataatcattagttgatttttttctgtttctttctctgtcgacagaaagctcagccatttttcatcgggagaaacttttagctcggtactattttttaattggttgccccatacctgcctttcttttgtctctcgatcaacactgaaaatttctgattgatagcagttcttttcttcgttaaccgtattctcaagataaaagatacggttcccagccgctactggctgtgccacactcttcaactcaaacaacgactctttttttattttcatttacccgcctccaaaattaggataattccattatagcaaaatccgctgacgtgatgtcagcggatttactctttattcttaataggtatatccacgaacgatgccggattcttcaaaaccggcagagaaacccgtttgtcggaaaatcgtctgaccattttctatcaacgtcagcaaaatctccgtactggcactttcccgaataattcgattcatcacaccatccgttggtgccatcaaggaatggccctctttttctgcaacttcaatcgttagttcaagcactttttgcctaacaataatcactaatcgaccttgtttgcgagtcacagaatctaagcgggcaccataatacgttgccaagcgatattctttatcccctatttgtaagactgaaataatccctaaaaaagccgttcctaaaaaaggaatgtctgctgctgagaaaaagaaacggacatcaggtgcctcaaatcgattgcattgtacccatagataggcagcaggaaacgaggttccccagtctttttcgagatacccgattccttcagagaaatcaagtgactgctcattccatagcaaagttcccgagaggctatgagccatacttaaaataccatggtagcattccataaatgaaaggtaggaaaaaggccccataatacttggtgcatagcgactccgagatattggatgaaaggcaccgtaggtcaatgtgcctttaactgataattcagtactctctaatgatagcgaaattccttgttcactaaagtaattctccccgatcttaattaataactggtcttcagcagctgaaaattccgcttcactaaaggggaaataatgggatccttcatggctgatcacttgaataaatggctgttttcttccatccgattcaatcgatagccctggaataaatgcatacacctcatccccaatttgatgtttgaaataccatccttcaaaaaatgcagctttcttcgtattgccatgaaaaaaaagatctgttgtaatcgccatacgttccctccattcagctacaactagtgtagcatgaatggcacaaaagatgggttatgacgttttcaccaatccaggattgtaagatctacgatttttctgttcgtattctcgatcacggcttacttatcttttgcagaacgtctggtccaaaggatataaacagcaaaagctgccacaagcaatgcaatcaacagccctttaaaccgattatcatttgtcaaattctctttggaggcccatcgttgaaggattccaagtataacgaaaatcgttagcataaaggcgacgggataaaagtctttttccttgcgcaagaaaatcaaggcgcaggcagcgactaatagcaccaacattagcaccatatccattggataagataacgtcaccacaaaaaggttaggggtatatagattcagtaaaaccaaaccaccaatccagactatcgctatcacccacaaaaccaaaaatttctttaacttactctgaaaaaaaccttgctttaaataaatcgttttttgcaccccaaagaaaaagaggatgaccaaaacgactgaaaaaacagcagttgtcacataagaataaagatttaactgcaagacactatcagaagaaaagtcattaaacagtttgaccagccatgagacgccgaccataatataaatcaaattcaactgatcgatcaaacggcttttaggtgtgttacgcaacagctcatctgccatttctttaggatttttcccaaaatattcttctgctgtttcaccatgattttgggcttcaagtaaatcattggctatctcatagacttgagcaaccacagcatattcatcttgaaacaggctagaaaaaaataagtactccctcaaatcttcaaaatatttctgattgcttgctgacagttgttttgaaatctcatttgttttgtctcggtaataagctagttgttttttcttattcatgttctcactcctcaataattcgttctactttactcactaggttttcccactgttgtttaaagctgtttaggtactcttctccagcttctgtcaatgaaaaatatttcctgtctggtccatctggtgattttttcagttcagctttgatcaaacgttgtttctccagtttctgaagtaaggggtaaatcgtaccgccaacgatcgtttcaaaaccatatcctctcaattcttgtacaagctcgtacccataaatttctttttttgaaataatctgcaagacacatccatctaagacgccctttaacagttgcgtttctctcacgacattcacctccacgaatcatctcctactagtatgttttacctattagttgatttgagtatatcaaaaagcatctagtatgtaaagcatactagctaaaaaaataaaaacacagtacgtgtaaacatactgtgttttcggttatcttttgattcctcgcccataggaatcattataaggttgaaatgagcgatcgtggagctgggtagcggcatctgccaaccagtgaatatttctaatcaacgctcgtccttgtaaaattaaatccgcttgcttggtttgcagaatgtgttcacataaattagggttatccagcatcccaacggtagccactgggatcttaacagctgctttcatagctgttgcaaaaggtgtttgatacccttcataaaccgggatcgttggctttctatctaacaaaccgcccgtagagatatctaaacaatcaatcccatctgcttcaagccactgtccaatttgttgccattctgtgattgaattttgtttatcctctgtttcataatcggttaacgacaaccgcatccaaagtgacccatcaaagacagctcgaaccgcttgaacaatttctttgacgaaacgatagcggcttgctaatgatccgccatattcatctgtccgctgattcacgattggtgagagaaattgatcaatcaaatatccgtgagctccgtgcaattcaatcatgtctacgccagcagcttgcgcacgtttggctgctgccacaaaggattcttggacacgattgatttcagcaagcgtcatttcgtgaggaacagcatagctttcgttaaagcgaacggcgctaggtgctattgggtaacctgcatccgctgctttgcgcccagcatggttcaactgaagccccactttgctaccgaaaccatgaagcaatgcaacgagttttgataactcaacttgttgcgcttcattccataaaccaagatcattcttggtgattcgtccatctgcttccacagcagttgactcaatgatcagcaagccaactttacttaatgcacgagcaccatagtgaacaaagtgaaatggcgtggcaatcccatcctcttttttcacttcatacatgcacattggtgaaaggacaacacgattctctaacgataaccccgccagttcaactggcgataatagtaatgacatactgacattcctccgctactcattaaattgcattttctgcttgttatcagtatagttgttacacatagaaatacaagcagaaagagtttgtttttttgaacatgaatcaaagaacagtaggcgaatagaccaaaagtcaatttactttgctgaaaactacagtctcccgttagctaagtatggagttagcctttattatttttaaaaacaaaaaagaattgctgattaataattctatcagcaattcttttccctatagttattataaaggaaaaaacgagtaaaaaacagactagtatttttgccgccacctcgtataatgaaacatactctgggaaatggatgtgaaaacagatggaaaagcaacgcatattagagaaacgtcatttatcttttgtttatcaaaaattggtcactcgaaaaaaagccctacgctcttttctggataaaggctacgcaagccatttgcaagacctccaaacaattggcacggatattcgactcaattttgataacttgtcagacagtctggaaacttatgctgccattgagagcaaaaatcgtgaaattgaccaaatgaatctgagtttgcaaacagccgaaaaagaactggcagccgtagaacgtttgctccagtcaccctattccgggaaaatagtcgttgactttcttgatggtgaatccgctgaatccttttatattggcatcaacggctttgcagttgaagatagtcataacttagtctatgattggcgctctccaatcgctgagcttttttataacaatacgttagggaattcttcttaccaagtcaatgaacatgaaattgctgtatctattaaaatagacggcaattaattgtcgctcatgataaactgatccgctttttcgatacttctgtcgcgatccaagatgatgtcttattgaccgcactagaaaagaacgacggcaaaaaaatgcgcgacatcacaacatccatccaaagagagcagaatgcagtcattcgtgaccaatcaagtcaaaccttattggtcaatggagtagccggtagtggaaaaacctaagttattatgcaacgggtcgcttatttattgtatcaataccgtagtcagatcacatctgacaatgtactgatcctttcacccaatcaagattttatccactatatctcagatgtcttgccttcattaggtgaaaagaatcctttaaatcagatgattcgtcaattttgctcgtatttgctgcaagaagcaaatacagttcctttagaaaatgaggaagcctattttttccgtttacaagaacctacttcttttcaaacagaaacgctccgcagcaatgagtttgtggcctttctgcaagaatcagccagcaagacagccctgatcgaaccttcgtttcactcaatccttcgaaagggtaaagtcgttatagccaaagaaaagattcagtcaatctatcaatctacaccacatctccctatgatcgagcgattgcaagcaaccaagaaacgattaataagtgagtgggagtcacaattgatcagaaatgccaaaaagaaccacttgcaagatcaagtattagcactttctgaacagcagcagcaacgatactttggtcatttgatcgaagacgactctccctccagtattcaaaagtatactgaacaattattgcgaacgaggtatcaagtcgttgatgaacaattgaaacagaatagctggatcgatgaggatcaatttttagaacactattatacggcgttcacccaacagccttatctgaaacattctactatcacgttagatgaagcagtaattcgtttattcaaccgacacctatttatcgagaaacttcctgtagcctcgctggcttttttgctgatcgatgaaatccaagattatacacccgctcagtgtacgctgttattgacactatttccccgagcagccttcaccatggttggggatgaaaatcaagcaatttttaattctgcgattgattttagagagattcaagaaatctttgaggctaacaatcgatcagtcacacgctatgacttacgaactagttaccgttccagtggtgaaattactaaattgtttgcaaagcttgccaaccatacaactatgtcgatcatgcctgttcgcccggccggagagcctccccgatttattcgttttgaaaacgagttggaatggctggcaactatcacacctttcataaaaaagggaaggcaatatacgatactgacaaagagccataaggaggctgcttttttggaagaatatctcaaaggacagacaaatcaactcccctttcctgtttattcgattgacatcgctaaaggaagagaatttgatcatgtcattctttatgacgtttcaaacgaacaattctatacaacacaagacaagcgaatattgtatacactgctgtcccgtggcatggaaagtatgctggttacttataaaaaagaacttagtgcctttttctaatccgaaaaccattgattcttgaataaagcccagaatcaaactactgccagatccagcacttaacaactaagtttttttagaaaaaagtacctttttgtctatttgagcaaatgcatctgcccaggcttaggataaatgaagtttcactttatttaccctaagcctttttgacttgtcccttcaacctccgactcttcttcgttgatccgcatccctttgtgataatcttacttgtcttcttctatgatcttaaaaacgtagatgcaaagatttcccatgggatgagaactagacggaataatttcgtcacaacatttgtccaataattgaaattgcagcggtcgtcaaccctggaagctcgtgtcagttgctccaattcaattgttttattcaagcgcggaaggcttttttacataaattttcacaacagtagagcattgaagcccaactgtcagttggaatagttggagcagcgtccgctatttgcagatacaaaaaaaccactaatgacgaatcattagtggttaaatctattgattaacgatgaatgtaagtataaccagatgcattcattgttgctgtgtttggtcctgtaggtgaagggaagcccattccaccttgagagatcgtaatggtgttgcttgaaggatcataagattctacataggctacgtgtccatacgtaccatctgctgtccactctccgccaacggattggcctgcggcaaagacaacaactgctccagcggctggtgttccattcactgtgtatccatcagctgctgctgaggcaccccattgggcaccatttccccagtaagtaccaacccatggtgcgcgatttttaacataccatgtacattgtcctactgcatacatgttacctgatgatgagtggtctttaccactaccaccggtattgactgtagaattattgctgttatttgtatttgatgaagaactgtttgatgaatttgaactattacttgatgaacttgagctgcttgatgatccagcagttgctgtttcaacaacagaagtatctgaagaactttctgtcttcgttgtacttgtttgaacatcttctgtaacagctgctttttcttgtgcttctttcaatgctgctgcctgttttgcttcttctgcttttttagcagccgctgcttcttgttgagctttcaagacacgtgctttttcagcttccgcttcttgttttttcttgttcaacgcatctttgtctttttcagctgttgcttgttcagcagctaaattagctttcaacacattcaagtctgcttgttttgtagccaatgcatctttttgattttgcagctcagcttgagttgctgctacttcttgaattttgctttcattttcttttactttttgttcaacatcttctttgtcgcgtttttgctgctcaactagatcattgttggcatttacgattgttgtcatggcttgtactcgaccaataacatccgtcaaagaatctgcttctagaactgcatcgataaagtttgtgctttgaccatttacttgcacatcgcgtgcttgttttttgatggcttcttcacgttttgcgatacgtaattttaaagtggcaattttatcttgtaatttttctgcttctttacctagtgcaacttgtttagcttctaagtcactgacttttgcactcactgaatcaatttctgcttctagagaatcgatttgtgattgagcatctgcttgttgtccttttagggaatcgattttttgattttgttgttcgatttgatcatcaatggaatctgctgatactaatcctggtcctgcaactgctgttaatgttagagaacacaccattaatgctgataacaaacttttcttcactcgtttttcctccgactagcgctttttgtgtaaattagttgtcttaataaaaaatttacttaatataagaaaatttaaagttcgatttaacgacaaatgaattctaacataagcatatgacatacagataaaagaaatgttacaaaaatgtttcaaagacaattctcatcagaaatattcttctatgctagctataaagcttgataaaacagcatttttaaaatgtttttcaaaaaaagaaatcgataaaaaagcgcttttttatttttcaggtagtccaaaaactcctgaaaaaaccaaaaaatttgcttttttacagtgtgaatccccttttttctctcttttggccctctctttatccgtttcttttttcattaaagaagataccgtgtaagcaaaatacttgatcctttctaagtgacaagcaagttttctcttcctataataggaagaataccgctcgaaaggaggaagcatcatttccaaaagaaaaataattatctggatcagtagcattttggtttgcggcttacttttgcttgctctttggacgaccaaaaaagcgaacagtgtgttgcagcaagattcagaaagcgaattttggctgctaagcgatgttcatttcctgtcgtcagcacttcacgataatagtatagccttcaaccagtttgctgaaggtgccgctggtaaagaaatgcgctatcaggcagaaagtttggaagcttttgttgctgaagccctagaaaaacgaccaacaggagtgatcttgacaggggacatgacattgaatggagagaaagcaagtgcagaatctcttgccgagttattggcaccattacaagaagcttcgatcatggtactgagtttgcccggcaatcatgagatttacaatggttgggccagaatttttgatggggataaggaattttatgccgatcaaatcagcccgcaagatttcaaagatattttttccgaaggctacgagaaagctgacagtgttgatcggacctcattaagctatagcatcaatctcaatgatcagtatcgcttagtattacttgattcatgtatttatgaagaacaagtgaattggaaccagccaactacgaatggccgcttgaaagaaagcaccttagaatggctgaaggatcaactagaagcagctaaacaacagcagcagacaccgcttctcttcatgcaccataatcttctggaacataattcattgttgaaagaaggttatattttagataactcggcgcaattgcagcaattactaactgcttatcaggtaccagcgattttttctggacacatccatatccaagatattacagaaggaccctctggtattcaggaaattgtcaccggctcttattccacacaagaacttggctatggggtcgtaacacttactgataaaacgatcaactacgaaaaaaaggtgattgatttggaccaatgggctgctaagaacaagcggaaagatcctcaccttttgcagtatagcaactatcaagcaaccatctttcaacaagatacaactaaaatggtgcgccaacagctcgcatctgttactgaattgacagaagaacaaatcaacacattatatacatttattgcaaagatgaatgcagcgttatttactggtgacgacgtttattcgcaagaagaaaaagaaacgattcgacattctgaagaataccagctgctggcaacatattcttattttctaaaacaatatgttgactcgctattggaagataagagtccagataatgcgctgacacttcccataaaatgaacgatagccttcctgtcataagacgggaaggctatctaacgatgcaatatttattctttgaaagttgaagcagactattactactattatttatttctcatttaaacgatgcaatccctaacctctactgcatccttgtaactctgaagttacgccagttttgaataaatttcctaaaaacaagataacgttggtacaaaaatatttctcgtattcaatcagtataacacattttggcaaaaatgtcgtcaacagacttcctctctccattcttgtgtagatttagcttggtattctttccttaacaggcaacatcacttcaaaaatctgctgttctttttgatccgtggatacatcatcttgccacatcagttcccagatatctccatctatctgtaaattagctgattccagataggctttgaatcgttttgtaaaatcttttaaatgatggatctcccctctgacgaatcccgacacataatttcctgctggtctacaaataattgcttgatccgagtaaagaggcagtcgttctttgggaatcatcactaatgcacggtaaggcgcttcatggatcgactcttgatcgaatgcagatccttctactaaataaccgatggggtagccactaaataaatccttgtaatctaaataaggataaaaacgtgaaaaagcctgaaagaccgaagtctcatcatactcattgatttcttcagaaacagcaaaatatacttctgaccgataactataagtcatattggtaaaatcggctgtctgtactttttcaaatcgcgaaatgaaccgatccaaaacggctttatgttcctctagttccgttattttctgatctacttctttacgacggatgatcaactctttttgcatcgtctcaggattgcggtttcttagaaatgtttggatttcctctaaggacatatccaatgctcgcaagaccaaaatcacatctaattccgcacactgttcaaatccgtaataacgatacccgttttcaccgatctgtttaggtttgaacagcccgatttgatcataataaagcagtgtacgacgactaacaccgccataagccgcaagttcactgatggtcaaaaattttttcaaaaaaaatgcctccctcctattgactgttacgttacgttacagtttattctagcacagaacgacgtaattggagggaatttttatgaaacaattaaaacaattttttttcaccgaaaaacgcctatttctaggtacttttttatttatgctgatccattctttcgggacactttttcttccctattttgtagccaagatcattgatgatggcattttaaaacaagatcaatcagctatcatccgctatgggggctggatgctggctgttgcactaggaactggtgtgattgctgtcagtgctagttatttttctgcccatctagcagggaaattcggacatcatcttcggatcaaactattcaacaaaatacaggagcttgcgatctctagttttgaaaaatatggtacaccaaccttgcttgcaagaacaacgaatgacatcaataacattcaacaaatcttgatgatggctttacaaatgattcttcccgctccactgatcattttggcttcgattattttaacaggtagtgtatcttggcgaatggtgtggatccctattgcagcgattgcttgtttctcgatcgtcgcacttttcgtcatttatcaagcaatccctttggcaaagaaaacgcagaaaaaagtagatactatgatgcggattttgcgtgaaacctatacaggcgtacgggtgattcgcgcctttgacaaagctagtttcgaaaaaaagcggacagaccaaacctttgaagggtacgcaaaagtgatgatccaagtcaatcgtttattcgctgttttgaatccagccgtacactttttcatggggctgtccattctaagcattttgggattcggcggtttccaaagtctctcaggaaacctgcccatcggcagtatcactgcgatcatcgaatataccgttttgagcctttggtttttgaccatggcagcaatggtgatcgtcatgatcccaaaaggattgacatccttgcagcggattgaagaagttttgtctgaagaagaaacgatggcagacggtccacagccaatcttgccaaaagaaagctcattagtagctgcctttcatcatgtctccttcacctatgctggggcagtggaacccgtactggaagatattgattttgagatccatcgcggacagaccactgcgattgttggcggcaccggatcaggaaaaagtacgatcgccaaagcacttttgcggttaaaagacgtttctaacggctcaatcacattatatgatcgtgatattcgagaagtctcacaggtcgcactacgatcatttatcagctatgttcctcaaaaagcattgttgatcagtggatcgatctgggacacattgactttcgggattgtcaatcccgatccgcaacaagtagcacaggccgtcaaaatcgcgcaagcagagtcgtttatcaaaagtctacccgatgggatcgacagtcacgttgctcaaaagggcagcaatttttctggcggccaaaaacaacgcttgagtatagcgcgcgcattagtgaagcccgctcacatttacttttttgatgacagtttttcggcgcttgactatcaaacagatgcaaatttacggcgagcattaaaatcttatgtccgtgattcagccgtagtgatcgtggctcagcgtgttgcaactgtcatggatgctgatcaaatcatcgttcttgatgaaggaaaaatcgtcggaaaagggacccactcagaactgatggaaacctgtagcacctatcaagaatttgcggcttcgcaaggaataggaggagaaaaaaatgagcaaaaaaataactgatgcaccaaaaaatttaaaacatacgagcatgcggctcttacaattattattccagcaaaaaagccgcttcggactgattttgatttctgctctctgctacgcgacacttatgacaatcgcaccattactgttgggtcaaggattggataatctcatcactttgcttcagcaaggaggctggcaaccaagtgaattcttgcaagtcatcaaatggccactgctccttctagggatctcctggctgatgattagtctattttcatttttacaagaatacacaatggcaagtgtcagcgaaacattgaccttaacccacagaaaagaattgacgcacaagtttaatcggttgccggtacgattttacgatacgcatcagacaggcgatattttaagccgagcaattctagacctggataaagtctctgaagtccttcaagtcggattgatgcaactcattacagccactctcagtatcttatttggtcttggtgtgatgttttggctcagtccattattaactgtagggattatcattatcctactgataagtgctttcgctacccatcgactggctcagcgaaatttggtttacttttcagaaaatcagacaacattgggagcagtcggtagccgggcagaagagttttatactgcccatttattgatcaaatcctacaatcagcaatctgctgtcgcttcagaaatgcacgaattaagtgaaaagcaatttcatgcttttcgtaaagcacaatttgctagctatgcgatcaatccgttcattcgctttatcaaccaaatcgggtttgtcgtaagtgctgtgattggtggaatgatggtaatcaatggacagttatccatcgggttgatccaagcctacttgcaatataccaatcaagtttccgaaccgatcacacaagcttcttatattattaatacgttacaaagtgcattagcgtcattggaacggatctttgagattttggattatccagaagaaaaagaaacccaacaccctcttgcagtcccagaagaattgtcggggagaatcgattttgaagatgtttctttcggttattctccagataaattattgatgcaacatgtgaacctacaagttgcacctagacagacagtagccatcgtggggcctactggggccggcaagacaactttgatcaacttgctgatgcgcttctatccactgaatggaggcaagatccggatcgatcgctacaatatgacggatttttcagccacagacattcgcaaaaaatttgggatggttttacaagacacatggttgtttgaaggaacgattgcagagaatattgcttacggcaaaaaagatgcaacgaaagaggcaatcattgccgccgcaaaagcagcacaatgcgatcattttattcggacactgccgaagggctacgagacgatcataggatccgaaaccgaactatcacaaggtcagcaacaacttttgacgattgctcgtgcaattttggcagatccagctattttgattctggacgaagcgacttccagtgttgatacccgaaccgaacaaatgatccaaacagcaatggacacattgacgaaaaatcgaacaagctttgtcattgcccatcgcctctccacgatcaagaatgctgatttgatccttgtgatggaagcaggacaaatcattgagcaaggcgaacatgaggaactgttagcaaaaccttcattatacgcccaactctacaatagtcagtttgccagaaattgattagaatttttgtcacgtttcatctagagatcaaaaagcgaaggccatcgccaacaaaaaagactgcgtctagtatacagacgcagtctttttttgagattcattgactcatttcttcatttttccttggagatcaccaggtcaagaaagtaatttccggaaatgaattttttactttaaagcaaaaaaagaagaccattgccggtcttcttttaaaagttgttattatgctttaacgatgtttgttgcttgtaagccacgttggccttcttcaacgtcgaaagtcactgcttgaccttcatctaaagttttgaagccgtcgccttggatagctgaaaagtgtgcaaatacatcattgccatcttcacctgtaataaatccaaaacctttatctgcattaaaccattttactgtaccgttattcataaacgtatacctccatattacacatcgtgtgtgtttatttttgtaatagaaaatgatgtgtaattgaagtgcgtatcaaaagataaacaagtattaacatatcagaactttacttttatagaataccatgccagaagaaaaatagcaatgataatgctgcttttctttttcgatactcgtaaaaccttaagttttccttggcaacaacttttctaatcctgtctctagctcttttaccaccttattcctttcacatatcctttgcgctttgtagaatatttgtagaacacgcgacgcttttgcgtacataagaacatgtaaaatagcgaattctaagacagtgctatctaggctatggtttcaagtacaagattcaacgccaatcgatacttgcctcttgcagaaacatgcaccgaacaattcttttattttatcaaacttgtctctggaaactttaaggaaatttttagccttctttttattctagttctatttaaaattatttaaaagtaaaattatttaaaagttagtagagaaaatccccaatgactcgctgaaacgtaaattgattcatagatgtccttctcatccctgtaaagataatttccattaaagctaccttactcataaatttttctttcttgaaactggattatgatattttcagtaagaattgcttgatatttattaaatttctcctcatttatgttttttgtttcacaaactaaacccctctatggtataatcattttgtttttaagaaaactatgggcatacaaaggagaaggtaacatgaaaaaaacaaaaatcactttaatcgctgcttcattgctaatgggaggaactcttctagctgcatgtagttctgataacaatacaactgcaagttcatcaactgctgcttcaactgcaacaactgcatcaacagatgatgttgtttcaacagcttcagtaagtgaccaaacttcagtcattgaaaaagcattgagcgcagacggtaactggatcgttgctgttacagacaacatgactttcgacaaagatttgacagttgacggcgaattccatgacaaaggggacgctgcaaatgatatctaccgtaaatttgcattgtactctcaagatgaaaaccgtacagtaactgctgaatacactgtaactgttcctaaattagttgttaactcagaaaacttcaacatcgttaacggtgtagtgaaaggcgacatcgaagtaaatgcaaaaggcttcgtattgaacggcactaaagttgaaggaaacatcacgttcgcttctaaagaaattcaagattcagcaacacttgataaagaaggcgcatctgttacaggtgacgtgaaagtcagcgaataattttttactgttttctttgtgaaaaacactttcgaaaaaggaaccttggatttgattttattcatctccaaggttttttctgtgtttttttattctctgttttatcgttgttcccactaactttgtgtaagtagctacaaagattttctgataatctaaaaaattcctcccatcgtttttcactctgacgcacacttgccaaaaatgtttgacgataagaggattttttacttcttgccgattaactgcttaattcaatgctactcactcttcaatagaagcccatttgtaatcatattgcgcacctgcaccatgagaaacgactcctttgacttttggcgcccgcaaatgggcttccacgttttggtaaacaggaatgacaccttgttctgccataatgattttttctgcttctagtagatcttgccaacgagcttcaggatctcccgcatgggttgaagcagcggcattcactgctgcatcataatctggattactccaacgaccacggttataggaatttccagtaacaaacagatctgtaaagctgctggcatctgcatagtcggccccccatccgcccattacaacatcaaagtctccgttgttggaacgatctagccgaacagaaaaaggtaccggactcaagctgactttcacaccatccaatgtactttcgattgcactttggacatactcgatcgcttttttagtcgagtcggtatcagaagccaagatttcaaaatctaatgaatcgattcctaaagctgctttggctttttcccagtgttctttcgctttgtcttcattgtattcgatcacactgccagcatcttcaacaaaatctttgttatccgtcgggctgaaagtcataccttctggaatcaatcctgtcgaagctagagatccgtcccccagaatggaggatacaagtgcatcacgatcgattgcataagaaattgcttttcgcaaatcttcattacggaatggagaattttcttctcgctgattcaattcgatataagaggtccgggccaaaggctctgaaacgaaagcttcatcatttgccatttgctgcgccaattctcctgttaagatcacatcgtctgcttgaccatcttggaatagattcaacgatgtcgcagattctttgacaacactgacattgatggtttgtaatttaacattttcttggtcccaatactgatcattcttttcgtaggaccattccgtatctgtacccggtccatcaaatcctgtcaaaacaaatgggccattgtacacagaattatcactggtcgttgcatattgatcgcctttttcttccacaattccttgattttgcgggaagaaagatgggaaagcgagtaaataatcaaaatagggggttgctttttctaaagtaatctctaattcgtactcactgactgctttgatccctaactcgctaggatctgtttttcctgcagtgatcgattcagcattcttgactggggcaaacaaataagcgtattctgaacctgtttcggcttttactgtccgttgccagccgtaaacataatccgcagctgttacaggatcaccattcgaccacttagcatcttctcgcaatttcaatcggtagatcaatccatcttcactcacttctgcgagttcagcagctccagcaggttgcggcttactgtcagcatccaaacgatacaatccttcatagacattattcaatgcactgaagctgatcgtatcagttgcaagagaaagatctgcactaggcatttcttgctggacgacaacattgaagatctgttccgctgctgctgttccattcgaggaagtactttctcctgtgttactcgtgcctcctgtcgtacatccggctaataagacaccacacactgctaccaatccaaaggcccactttttcattttcctcttccccttaagttcataattttcagaattttctgaagttgaatttgattttaatcaataattatgataattgcaagagtttttcgctcgtttttttcaaaaaagattaaaaaaaaattctttttttcataaataattaatctacaacctttatgttctctttcaaacaagaaaaaactgtgatacgcaagagcatcctatcagctccttacgtatcacagtcaaacaattatcaagcttccattttgtagctttctctactattcttacgatctcttatcacactaagaatcgtagggatcgcaccaattgcagtaaacagatagacaagagctaggttcccatagtattgactagcttccaaataaccttctcttagcaagtcaggcaatatccgaaatgcatagaaataatcaacatcggtataataattggctacactgatagaccaatcaatccgattgcctagataaaccatgatgaccataatcaaaacactaccgatgatgcctttgttgctcagctttccgccaagaagttcatacccttttaaagcacagccagccattgcaatacctgataatgccgctacataacctaattggccaagtaaaataatgacaccgaccccaatcagtgaacctataaatgcaccaactatcccagccagccagttttctttcttctgattctgctcatgcaggctagcaagcatcgcttcattttgctttttgaaacaagcactgcaagcgatcactggcagcccacctatgctgtaggtatctatcggcgcttccgatgttccgcaaaactgacagactgtttgatagtgattttctttaagaaaatcagtgactgtatctagaccagcaaccaatttttctttggttttggcaacagtcattgcccctcggaatgtataagtgacttggtaaccttgtacagagcagtccaatatgtctttggaatcagtcactacttgtctcacttgctctgagctaggtagttcttggtttttgctgatcgaaaaagttgctgcgaaagaataactattattattcaattgtgtcaatataactttatacgaacgatacgtaccgtaaatcacacccatttttggatctaccgacaaccccaacgtctccgcaaaactagataatgtttttacgagcttcttattcatttgtcctccttttaaacgatagattataacaaacgttataactttgagtgtaaaatagaggccaaaatcgtgtcaaaagatacgtttgtgtattttgtaacacgatttgttttctttaagcgattcccgatattaccatctgctggccttcaggaagtgatcgataagacaaatttctgaagagcagctgcaactccactgtctttatttgaaagtgtaacggcatccgcctgttccctgactcttcgtggtgcattggccattgcgacccctactccagcttttagtatcataggtaaatcattgaagttatctcctattgccaacgtttgcgctagaggcacgttgtaataagaagccagttccatcaatgctttttcttttgaaacttctcgatgcgtgacttctaggtaattatcttttgaaaggtaaagagcgctcgtcttcaaagattgcttttcccagtaaccttttactttttggatctcagcagacgtaccgatcaaaagtaatttatgaacgggtatttgcaaggactgtactaaggccaataaatctgcctcctgcgctacctcctgcgtgattgtggcttctttttttacccattcatcaagacgatccacataccaaactgtatctgaataaagattgatagaaacttgtgagaagtgtgttcttgtctcgctgatgattcgcacaacttctttgatggcaacttcatgacttgagataggcggagcagaaagatttccgtttgccagaactaacgcgccattgtaacaagtcaaaggatactcgctgattcctaacgcttcagctaagtgctgcatcccttttggtgatcgtgcagacgctaagacaaaaggaattttactttcttttaatcgttgcagcacctgttgtaagtttgggtcaatctgatgggtatcatctaaaatcgttccatcaatgtcgcttacgattaatttgatttctctcgtattcatttgtgcctcctaactttagctatgactttcattcgactatcttcatcctcaaattcgcctaaggatgaatccaattagcgtgattttttgattcgtaatgcttgattcttcgctaaataaaatggacgcaaataagcgactgtgtttgataaaagtagaacatcgggagatagttggatgttcaagcagttttcgagatattctttgcgtttcgtgatacgttcccacagttctggataatcggcttttaattcttgtcgcagttcttgatcagctaatgcaatacattcttccgcactgacaccagtatactcaggaacagatggaatgatatctacttggaacatcatgccgctttctaaaggtgtaagagagtccgcgtagattggtgaagacatccactcatcatccgaaaccagatgtccaggattcaagtgccagtgataactcttttttggcagaacttcttcaatcaatcgatacatctcgccacccgtttggttgattcgaattgcttccaaccaagtggtgatcgcctggtaatacggtttcacgacacgttcaaggtaatcttgttgttcagccggcaattgacttgcttctgagacgacaaatcccgtgcgactggagagtcctcctttataaccaatcgtcattgagaaaggatcacccaaagcaattcgtttgtgcgttggataaagattggcaaattcaaatcgtttaccgctagcagcgattggcaccacagaaggcatttgtccctctgccaacaaatatgccccaatttcggcttcttttttgccaacttcaatcgcattcatcgcactcaaaatacaacgagaagaaaggttagccccatattcataatgagcgatctcattggcattgttgtgactacggcttcctttttcaccaatcagcaaataagcagcatttaccacatgacatgtccttgtgactgcccgtttgactgcatctacgataaaataaggaacatcaaagagtgtggctggatcttcgtgatgcgtcgtgaacatcttccacccaatgatgccaatttttttcttctctttaaaccttaaagaagaaaaaacagaggatagtgatttttctcctgtcataggctgattcggcagcgaaaactgcgggtaatggactagctctgccgctatgcgggaatgagcctgcagctttaaattttcatttcccaaaatgagtgttgcggcgccagttttatctagaaccaatagtccttcctcgaatcttggcaggaatcctgacagatattcaaagttgctgccatgttctttgtctgcatagatcaccaacgtgtcaaactcttcagcagccattcgctctaagacacttagtttgcgctgactcatggtcgcatcacttaaaaaaactggagcgacctcttcaaaaataggtggttctggtaaaatggctaattcaatcgcttttttcatgattaagactccttctgatttactctgttacataaatggtcacattcgctgcggcaagtgctgcttgtaactcgatgtctggttgttgatcggtgattaaaagatcgatctccggcagatcacagactttaaaaaaaccagtcgttgctaactttgtatggtcagctactgcaatgacatactctccttgtttcaccatctgacgcttgaccatgccttcttcttccgtatggataaatacgccttctgtagaaagggcaaatactcctaacagtgtgtaatctgcctgaaattgggcaagtttggcaacagtatccgcaccatataaaaataattgttctttgtctaatcttccaggcaaaaccgtaatcgtactctgttttagcgctgccaatcgttgggcatgagtcaatgaattagtaatcgcttgaagaggataatctgacagttcattgatcaccgcttctacagttgtcgatgcatcaaaaataatcgcagctggctgtttgatccaatgaatagctgctttagcaatttttgcttttatgtcataaaattgcccggcgcgagtttgataatcataaatcacggctgcagggttcgtcgaaaccgcccctccgtgggttcgtttaagtacttgccgtttttctaattgaatcagatcacgacgaatcgtatcttttgatacggataacaacttggacaatcgttcaatcgaagcactttgctcaactgctagcacttcttggattttagctaggcgctgttccacaaacatctctctgtcattcctttccactaaaaaatacaatgcaaaaaattgctaaacaatgcaaaaagatgcaaacgatcttaaaaaaactacctccaacaaacatgttgcaggtagttttgtcgtcattgttcttcttattttacacgaagcgcaaagctggctgttgaaaaacctgaacttgcttcggtaaccgtgtacccagtgcttggtgcatgaatgaagctgccgttaccagttgcaattgcaacatgatacgtattgcctttttcaccccagaatagaagatctcctgcttgggcttgagatacagggatgatcgtaccggcactttcttgcggaacggtccaatcgccaatatttttccctgttacttgtaaaaagacataacgagtgaaaccggaacagtcaaagacatctggccctttccctccccattggtagggtgtcccgatatatttacgggcttcagctacaatagcagcaccgttaatattcgtaccgatagtattgttgccagaattgccaggatttgttgtggtatttccactgacttcttttacgtaagctgccgtgatccagccaccgctagataacttataccacgtcgtattaccattgacagaagtcccttttttctgcgccactgctttcactacagcgttgctgctcaaactgctgacaatactggcagtagttgaagcgttcgaacgaacattcatcccagtcgtagtctgtagatttttactgattgcttgttcggcagaattatttgatgaattagaattattgctgcttgatccaccggttgatggactgctcgtattgctcgcatctttgacataagctgccgtgatccaaccacctgtagataatttgtaccatgtcttattgccgttgacggatgaacctgatttttgagcgacaactttaacggtcgtgctattgctcagacttcccacaacactaccacttgttgatgcactggaacgtacattcaatgaagcggtggtcttgacatttttgctgattgcttgttctgtagttgatgtgtttccaggattgcttgtcgttgaaccgctagacacagcctgaacataagctgcggtaatccagccaccattagacaatttgtaccatgttgttgtaccattcacggaagttcctgatttttgagcaaccacaatgaccgtggcattgctgctcaatccccgaacgacactcgcactggttgatgcactagaccgtacattcagtgctgctgttgttttgacggtcttattgacagctgtttctccgctagtactgttgttggaagagttgctgttgctggcggttgttacataagcgccagagatccagcccccagatgacaacttgtaccacgttgtgttcccattgacggaagttcctgatttttgagcaacagctttgatcgtggtattgttccccacaccgttgataattctcgcactggttgaagcgtctgaacgcacattcagtgaagcggtcgttttaaattgtcgattgatcgttgtttctgacgatcgagcaagagttgtcgttgcagttgatttagttgactttgctacttctgtttcatttactcctgtagcgttggcctctggtgcgttgaccaaagttgtgaatacacctgatgtagaagctaacaccgttgtaacccctatacttttttgaataaaaagtgatcgtttttgtttcactaaacgcttacggattgcttttcgagattccaatgaaacaccccctccttttcattctatcaaaatcgattgatttttaacatcttttttctgtctgtaacatttatttaatgtaggtttattccttggcaccgaaaaattttctttctaaacccacgttttacctatacaaacgatacaaatacaattctattttaaatgaaaaaaatatagaacgctatcaaaacgaatgaacccgactgtttttttggaaactagagtagctcctatcaaataaacaaggtaggccaattttcttcaataatcctgccatctactcgacatttatttgcaatctagtccttttttcttcacaaatactattttaaaaagcgttaaagctttaaaaacaaaagagaaaccgttttaattctttgtgaaattatgctatagtaaaaaaaaggaagaggtgacttaaaatgaaaacgaaatcgaaagaaaaagtttatgccgagcgtcagcatagttataagcaagaaaaagaggaaattttcaaaaaagcccttgcttctgtaccaaaaaaagacaaaaaatccgccgctaaagacaaacgatgacccttatctgcctgcgacatttactttaggctgctttgtagcttgaaaaacatgcctgactattcaaccgatccgagtagactctcggttcggctaaataatcaggtattttttgtgtcgttaaagctttaaagatcccgtcattcctttgacaaaccctcgttgcataaagagaaaaaggactaatgtagggatcgttgcaatgacaattgctgtcatctgcacgccatagttcgcaacataagaagccgatgataagttcgatatcagcaacgtcatcgtttgacgatcttctgtctgcaaaaagatcagcgggagcaaatagctattccatgagttcataaaagcatagatagccgctgctgcataagttgagcgcatcattggaaaaacgatccgaaagaaaatcgtatactcacttgctccttcgatcctgctggcatctaaaatgccatcgggaaaggacttgaaattttgacgaaagaaaaaaatcaggaagagattattgactagcggcaaaataacggcgatatgctgatttacaagatgcaggcctgacatcatcttaaacaatgggatgactaatgcagccagtggaatcatcatgcacagtaaaaaaagcgagtaaatcatttcactgctgcgggttcgaaatttctcaaaaccaaatgccgccaatgatgtgatcagtaaactaaatagaacagtaattacagaaatcttgatcgaattccacatgatcaaggaaacattatagttagaaaatagttgctgaaggttcgtgatcagctgatttcctagtgtgagttttccagcagcaatctgattcgatgtattcgtcgctcccgcgatcatccaatagaaaggaaagatagagacgaatgccgctacgatcaaaaaaagatattttatcagtgtattcacatttcgcttcatcgctgctcctttctgcttattgtcggtcgtcttttgctaatttgaactgcgcataggataagaccgcaatgagcactaccaacgcccacgacaatgttgctgaataaccaaaatttgaggtatagacaaatgaatgattgtagatcagttgtgctgcagtcaatgtcgcatttgaagggccaccgcctgttaaattcaccacttcatcaaagagctgaatcgttccgatcgtcgatgtgattgtggtaaaaacaatcactggcttcaattgaggaataatgatcctaaagaacttctgaaagctgtttgcgccatctatatccgcagcctccaacgtatcatctgaaatattttgtaatcctgctaaataaaaaatcatgttataccctgtccagcgccagcataaggcaatgatcaccgtcactttcgcccaaaaagggctatttaaccagtctaacggttgttggataattccaattgccagcaagccccgattaatgatcccaccgatctggaacatcatcttaaacaaaaccgcataagaaaccagagaggtgacacttggcagaaataaggcaagcttaaaaaaagttcgtccaactagttttggtgtattcaacacaaaagctagtaaaagtcctaaaaacaccatgattggcacttgaaaaatcaagaaaacaaaattgttgaataatgctttgtggaaaatggtatcttgaaacatccgaacgtaattgcctaaaccaacaaaaacggattgcaatccttgcatcgtatgaagagataaataaattgaataaagaattggatagatcatgaaaatactgcttaagatcattgcaaaactaataaatttccatacttctcgcctttttctcgaaggatccatcttattcactccctgctaatgcaaatcggctactcgccgacttgcattgtataattattttcggcttcttctagcatttcgtccaaactcaatgcatcatcaaaataactctgcataactcctcgaagagcatcaaccgctgcttgcgtattgttgccatagtcgacaccagggatttcagccatccaactcgaaaaatctttatagatgggcgcatcattgaaaaatgggtctttgtattgatacgcatcccctttttgagatggtaaatacgttcccactgccccattctcgaccaatatctcttgataaaattcatcattgcctgcaaattctgtcttcaagaaatccattgccagttctttatttggcgaatcgttcaaaactaaccagcttgatccgcctaggtttgaatagggggtcgccccatcaactgtctctaattgtggcagatgtgtataagcccacttgcctttttgatcctccgcggaacgaatcgttgctgaaaaccaaatggcagaattaaccgccgcgacttcaccactcgtaactgctccgattccctcaggagcaaaataatctaccggttttgctaactctttctggtcaatctcttttaggatcggcatcatttcgcggatcgctggattgtctttcaagaaaattttgccctcttcatcgaaataccacagtccggcagactgcatcgccatctgcagataatgggtcccacggttgggaatgaatgcgacaaaccatttaccggtcttttctttcacatcttcaccgatagtgacaaattgggaccaagtcaaatctttcatatcttcttcactgtagcctgcctcacttaaataatcggtgcgataatataatccggcagaaccagaatcaaatgggactgcatagattccctccttataggtagcattctctactttgtattcggcaaaatcagcaaagtcgatggtatcagataactccgcaaatttcccttcataattcgtaagataactttgtacatcataatcatccatcaaaacgatatcaggcaatccttctgatacccccgacgtgaatccagaaaccattttttgctttgtgtcctcattcgacatttcgatgacattcactttaatctcatcatgcccatccttacggtagtactcccctgctttttccataattggaatattgaaattcgtatcccaagcccagacagtcaatgtctgctcatctgaactagcaaaatctcctgattcactactctcattattactggaacaaccaacaagcaacgcaaagctcaatatactatatagaaaaatcaacctttttttcatttttctctcctcctatttgcttttcctaaaatcccagcaaaggtgcaatagaaagcgattgcaccttgcttttattatagatatcagatgaaaaaaaccaaataattgaatttctgttgataaaaatgaataaatttgagccatgatgaatggaaacaaaatatgaaagaagtgcagaacaatgagattaaaatgagaaaatgatatagtagtgctaacatacaggaggtgagcagatggtttttacgattattctaaaattattctttgggttatttggcttattgttggtggcaagactgttagggaaaaagacactgtcggaaatcacacctttcgacttgatttatactctcgttttaggcggaattttagaagagtcgatctacgatgacaacgtttcggtcttccatgtccttttcgctatcgctttgtgggcactgttgatttactttattgaagaatttgttaaaaaaaatgagacaatcaatcgctggttgaaaggcgaaccggcagtcttgattcacaatggtcagctcaatatacaagagattacccgcaatcatatcgaaatggagcagttgcgaaccatgttacggcaacaacaatgtttctcccttgcaaatgccaagtatgttgtactggaaaacgcggggcaaatcagtgttttaacacattcagaggatgagcaaacattggcaatcatgctggttgaccaaggaaatattcaatatcctgtactgcaatcccatcatttgagcgaaacttggctacgagaagaattacagaaacaaggctattcttctttcaaaaatcttatttatgtagagtggtcccaagacaatgggttttatatcatcaccaaggcagagacgatccaggctcgctaccgaatcgatggctaaaacaatcattcgattttaagatacttttcctctttaggaagatgccatcaggaagataccatccatcaaacaactattttcgacgagtaatcacttagcaatcagcatgagcaaaaaagacttactttaaaaacgttattttttcctcactgcctcttcatagagatttctttgttttcttggaattttttcagatgaaagaagtattctactgaattagatggaggtgaagggatatagaggtaattggtggattgattttttggattcctgttttattgtttcttattatcggatcgatatttattacatggcgaaagaatgtcgttgtactactctttcttttgataccatttttgttttttttactaaatgtttttgatcatcatcattatgaacccatgtctgatttgatgtacaatcttttaggactagctctttcaacgattgctatcatcttttatttgctttttcaaagcaaaaagaaatagagtctatgccataagatcttcgacaaacggatatcccatcggtgacgatgtcccgttgtactccagtcgaatcttgtaacaaaagagcgatgattcaacgatcaatcagatgttttttatttttactaagattaaataagtgaacgaatactcactcaaataaaagatatcccaacaatgagaaatagttagcccgtcttcacgattttatcgcgagtattggctagctactcttaggcgggatatcttttttcgcttgaatcttcttatacaaagcagaactcaattttttcactagggccttagctattgctataattgcaggcaactagtccacttgttcgatagtcgttgtcccccagttcatgacatttgcaacatggacatacccatcataaagatttaacagcaaagcgattgcacagacaatataaacaagtcgataaaaagaatttgtcttcttgttgcgccaaatggcaaaaccgcttaggaggatgcctaaaggaaagatgaatgaggatacgccggctaaaagcagcaaaatcaatccttcatctttatcagaagacatttgttgggtgataaaactcaacttcttctttttatcttcaatttccacattattcttttgaatttgttctttcaattgttcattttcctgcagcaattcatcaatcgatacttgataaagtttgcttagtaaaactaaattatcaatatctggatagccacgcccattctcccacttagagatcgactgacgagaaatctttaattcttctgctacggaagcttgcgacaatccgcttttctcacgatataattttagttgttccgctaaggccactaatttcatctcctacacctattactttacaactagtttaccattagaaatggttgcggtcacgcttgcatttgttgtaatcgttccagctttttgtttaaagctgcaagtagccttagtagtcgtatgggttaatgaactcgaaagaatacttcctttcaatgctttgatgctcaaatttgtcgccgctgtgatctgttcttttgagttgatctttacattataagaagcagtccaacttcctttgactgtcttagacactttataagttccttgagcaattcgtgcaaagggttgaatatattcaacagatagtacgacttcatcacccgcttcatcaatataagatatctcttgagaaccgacgccagcggtcatttcataaacaagctcatctgtattcttttcatccgctgcagctgtgacagacacccccaaaaaacctaaaaaacaggctactaaaataactaatttcttcataaaaacactcctctcttatttgttttcactttatcgcttttcttgaaatataaggagaaactataggtttacagggggaaaccattggtttacatccttcatttccctttcattgtaaacaaaaggttgcttcttttctataacaattactgtaataatggaaaagtacgatctgtggggaggtgtcagaatgaaaaggcaaaataaaatcctattattcagttttagtctgccgctttttagtgtttttttcggtccagtatctagccaacaatttggtcccttgtacgaatatgcttttggcttcccgctaagattcatctggtataggagtatcaatgaacctcttgaaagtcattgggcactcttttcctttgaaaagatcgctcacttgcaagttgatttacttggctactttcttgcagtgctgctgacttatctcgtttcccgatttttgttcgagcaactctcacaatggctgcataagcatgtgcaaagcggactattataaataaaaggaatgttttcgttaagaggataaaccctttctcaatccacaaagacaatacgacctcaagatgtcgtaggcgaaaacaagttccccctatatattgtggataaaactgttaatatgtgcataactcggtctttgacacgctgttttacgaataaaacggcccaacaagtatccttttcacagataaatgttgggctggtatcttaactcatcctcattttccagcagaccttcgcaaaaaattttttgccttgctgctaaacttatttttgttattcgtcattctcgtgctatccatcgatctctttcagtgctgctgacggcacgtcttctttggcaatttcttcatacgtctcaacatgtgcccctttattcgtcaatttcaaaaagcgctctgtcttcaacacttgtaagccttcaaattctatcattcgagtctggccatctgccgtggcagctacttgtttgtaatgagcagtgccatagccgttgaccgattcaggcgcttgcgtttttacatacatttcgctttttggaacaagtggattcaattgatctaaaattcctgccacctctcccgatgctcggttagtgtacaacatgattcccccgcacagaagtaagaaaaacaaaccaattgataagattgctcgtacgatttttttcatcatattctcctttcgtctctctttctatcttagcaaaataaaaacaggggaaatcggccttaggtcccaatccaaaataacaaaattgaaaggttgccgtaagaaaacttctacaacttattgatatttgcttaatactgcttatccagctaggcaacaaaggcaaaaaagattacaataattaaaaaaaggagtacctatatgcttacacatttcaatcttattgctattcttttggcaacacttgcttttatgatcagcgggagcttactttataatccaatccatgcttgggggcgcttttgggcaaaagaatctggcatgctaaataaagaaagtcatcatatgtctgccggcgatgtcgtttttacttttggcgggacagctgttggcggactattattggcatttacactaggacaagtcacctattggttcaatacgtttgaccatgacggttggatgatgacgagcttgcaagtggcctttttgctatggctgggcgtatttgctgtggcaactttcgtaaatgcagcctatgctggacaaagcaaaaaactgattggtctgcatttattgaatggtgcaatcgagttagtcattatgggaatcatcattggcttgtttccagtggtaggttaacaagctgatacgcaatcataagcaagtgtttctcaagctatcgggggcagaaaaaaacaggtaatgtaaaccaatcagtgaaaacctgtcgtaaggtatgagtgggctagcttgtcgttttttgattattcttgggccaaaaaaagaaagaagggatcaccatcaactacctgcccaatctcttgtccattgcacggatcgcgttagctggtcttctattgatcaatcagcagcctttgttttcagtctgctacctcatttgcggattgacggatgttttagacggatttattgcacgaaactatcgattgcaaacgaccttgggctcaaaactagatagtttaggtgattttgttttttggtccattgtcctatttctttacattaaaactaagatctatccagattggatcatttatggcattgtcttagtcgctagcattcgatttcttaatttgattttgactaaagttaagtttgctcagtgggggatgctgcacacattgagcaacaagataacaggtcttgccttgtttctcctgtgtttcgtggcatttacttttggtgacgtatcaggatatatttgggtcgtgacattcctgctcgctttgttttcatctatagaggaaacactgattgtctggcgcagcacttattacgaaccgaatccaaaaggctttttcactgtttctcatcaatccagctaaattttagcaacaagagtatcaaaaaaacgtccagctgtaataagagctggacgttttttgcgtactatctattatgaatagtaatgtttatttattttttagcgtattctgaagcttggacccctgcttgacgaccaaagaccatgatatcagcaactgcatttccgccgatacggttttgtccgtgaataccaccagttacttctccagcagcgtataaaccatcaataacagaaccgtcttttttcaagacttgtgtattggtattgatttttacaccacccattgtgtggtggattcctggtgcgattttgattgcatagtaaggaccagttgttaagtcataatccattgctgtttctcgaccaaatgcttcgtcttttttatctttaacagattgattccatgtatctagtgtttttgccaatgtatcagcgtccatgtcgattttcttcgctaaggcttcgatcgtatctgcttcaacgactacaccttgttctttgtagaaatcaacttgttttgctcgacctgctaatgcatcgtcaaagatcaagtaagcatagctttctggaagagcggtaatcgccgcagaaacattgtcgcgggtttctaattcgttgtagaaacgttcaccttgttggttgactaaaatcgcaccttctccacggactgtttcactgactaacatccctgtatcttgaacaactgttgggtgaacttgaatttgatccatatcgactgttgcaccgccaagagattcaatcatcttgataccgtcacctgtactgccttcagatgttgtgctgacatagccttttaaatccggacgatatttttcaatcatttctttgtttgagccaaagccaccagtggtaacgacaactgcattcccattgatcgttttttcttcatcaccgatttttacagaaacgccagtgacttttccgtctttttcgttgattttcttcacatcagcattcacaaacaaaggaatttccttttcatggatatttctcaatagtccatctaccaagtaggttccgacagcagagccgtcatgtggacggtggatacgtttgacacttgcaccaccactgtagctgatgttgtctaatgtgattcccatgccgtctaaccagtcaatggctgaagctgagttatcgactaagtagtgtaaaagttcttggtcattcgtacctttaccaccttttagtgtgtcatcaaagaactgttggttgctgtcttcgattccttgttctttttggaattttgtttcagaagcattcatcccaccagaagatttcaatgtgtttccgcctgcgatcggcattttttccaagatgactggattcatcccagcttctttggcagataaagcagctgccattccggcaccaccagcaccaacaatgacaatgtcatattgatcttttagttcagaaggatcggtatattcttgttcagatgcacctgaagccacttctgtttcgcttgatgatgctgaactttttgctgtttcactatcttttgtcgccccgttactaccacaagcactgagcaataataaacttgcagcgccaatgaccaatttctttaatccacttgttttcacttttttcccccaactttctttcttttgtttgattgttctttgattcttccactgaaaaagcagcgctctagcactattgattgttactttattaacaaacaagaataaaaaaatattttgactattaacaatttcaattgctttaaaatcagcgttatcatctaaaaaacaaacccaacatatttatataaacataataaaaatagaaaataataaaatcacgcttatattttgtgtaatttttcattagttgttctaatcgaaatttcatttactgtgtatatgtccccattgatcagcggtgcatacatagaaatatatacacaccgcaggcaaaaccttaggaatttttctttgattgcttctggtcaaaatttatttgattgcttctattctttacttgccaactgctagttgcttttttggaacgataattttctacatctttattacacagaaatatccttagcgctttcatgattttcgaaaacggcactgactacttgttgcgaaaaaacaatcacattctcctgcaagatgtgttctcctctgatggattcgattttctttgtcagacgttcaatctctaaactgtcgatcgctccactcatgtagattgccgaacgattctggtaggtgtttgagataatgatgtctggctcttcaactagtgattccgcagcaataaaatcaatattataaagagcggagaagatctttttcagctgcataatgaagaactgttcaaatgagaaaggaaaatctgtttctacagaaacaatgatctttttctcaaataaagtaggtgtgatcagagccgtgtaggcaagaacatatcgtaagagcagaaactcctgtttttctgtaagttgccctgttgtgctgccaaaacaaatggtacgtattttattcacaagcactgggtagtagtgtctgtaatagcggatgatatctgaatcggaacctacttccaggaatccttcaaaagcgtcataaaaagaatgcaccgccaataaaatgccgaagacatttttctcatttccgccatttaacggcaatgtcaatttttctgagagactgactgcttctaaatacacctctgctttttctctttcccaaaaatcgatgatttgcttataggtcgcctttttagcgtaaaactgcgtggaagtttgcatcatcaaaaatagaaaataaatgctttcatctctaaaaaagctatactgaaagaaagaatctttgatattttgaaactctttttcaaatagatcttgagtcatattgatcgaccattgaggcatttcctccattttcaagcggttgccttttttatctctgaggatgttgatcgcaatcaagtagcaccatttatccacgatcgattgcttcagttgaaaatcaaaattaggtaagattcgctgaacgaataattctctgatatgagcataattcaattcggggtagggccactgaccgcctttacaaatcgtccaaaaaaaggaatgaccaaagtaacgaatttggctttcggacccttcaatcacgattcgtctatttttggtgcctatctttaattcaaagcgttgcagactacggttgatgcaaagaaatttttttcttaggtttgaaaggcttatgtaattcaattcacaaaactcttcaatcttaattctttttgacaatagacagttctcgatcacttgatatatgactgactgattataaatttcatgttgtatatcaaaataaatgtttttattgccactaaaagagcaccctaatgcttttttgattttgattgcttgcggattgattttttgcaattcattaagaatactatccgttgtttttcgattcacattcagtctttctgataaattaacgattgttacaaaactatttgactgataaatataacgcaagcaattgaccattaattgggttcgcttttcaaaaagatcctgaataatcatgtcttcctcctgcattaaatagaagttcgttcataagttgctttctttcatactcatataaactgacaaaacgattaaatatatatattaatttttaatctaattttaaacatttgtcgaataagtcgctcattcttcatctgttctatgtagtgcgactcaacaaaggaagaacgctcaactttttactgttataaaaaaaggcatctgactgccttctctgaccttaattctgtaattgatcctccctactacttaagtgcttcctttcagccatcaatttttaatgagaatttaactccactaactaaaaattataaagttaatctgtatcttgagaaacccaattcgggaaaatgaactcacttttttttacattgtcactagaaatgttttggcaggaactcctataaatgcaggaaaattattgttaataaagacctttttatcgctgctttcggttagccatttactgacgataattatccatgtgatgcttttatactttttcaggaaaaacaaatccccctattttatcttacacaagcaaaagagaccttcgagaatagccaaaggtctcttgaaaaaattattgttgatgtttctggactcatcctatacgaacgttcttgcgagcggtatatattttaagatgatttgcttcgtgttttttttaatgctttaaataaggtgtgatattggcctttaaaggacatggcttgttcaaaaatatcttcgccgtcattcagcatcttaacagtaacccaacctaaagattcagtaatagcactggctacccccgcgttaatggacgcgccggcgatcgtaccgacccccggtacgaacttgataatattccccacagcgcttctacctaaactaacaacaactaattctttagaaatgctttttgcgattccctcgacccacgattgaccaaacaacttgtgtagtctagccatcatcgtcatttgaacaggtacaaggagtatcgcatctgaaaacggaataggtgaacaaccaatgatggccgccgtcagagaagcggcatggatgattcgatgcgctttcttcttcgtagcatcatccacacccattaaaaattcagagaagacggcatcaaattgggtacggctttttgcttggatcttttctgccgtatgttttgacttctcaaaagatcgacgaatgatccctgccgttttgtttggtagtttggttaaaacttctgcaaagaatgactgaaactcttcttgttctgccgattctttcactggttcatccacttgttgcagcaaaatttttttttgagattttttacttttgggagtgtttctctttaatttcataaaaaccacctttaatgattagttgtcatagatttagttgctttctcaacctcttattttcatcatacactaacaaacaaaaatcacctaaagccgcgcttcaggtgttataattcttaacggaagcacaagaaatcaacttctttctaacaaaaaagctcacatgaccgatccaacgataccccctttaaacgagagtctctcccgtggtataatgactacttgtttcttgggtattatgaaagtgtcataacctctattcagagaagcatgtctaatcgagcgtgttttattcatataggcagcagctgctgccaatccccacaacaaatcatcaattgataaggagaaaacaaatcaatgacctatgcacttgaaataaaagatctaaaaaaagtctatgcgaccggcgtcgaagcattacgcggtatcaacttgacagttgaagaaggtgacttctatgcgcttttagggccgaacggtgctggcaaatcaacaaccatcgggatcattacttcactagtaaacaaatcttctggcagtgtcaaagttttcggttatgatttggacaaagaattggttcaagtcaagcaacaaatcggcttagttccacaagaattcaatttcaatcctttcgaaacagtacagcaaatcgtcgtcaatcaagcgggctactacggcgttcctcgcaaagaagcgatcgctcgtagcgaaaaatacctaaagcaatccaatttatgggagaaacgcgatgttcgggccagaatgctttcgggaggaatgaagcgccgtttgatgattgcacgggctctgatgcacgagccgcgactcttaatcctcgatgaaccaacagctggcgtagatatcgaactgcgccgagaaatgtgggccttcttgcaaaaattaaataaaaatggtacgacgattattctaaccactcactatttagaggaagcagaaatgctctgccgcaacatcggaatcattcaatccggtgaattgatcgaagataccagcatgaagacccttttgtccaaattacagtttgagacattcctctttgacttagatacctatgtgaaaccacctgtgatctccggctataaaagtgcttttgaagatgatcaaacgttagcagtcgagattgagcgcaatcaaggcgttaatgatttgtttgagcaatttactaagcaaggaatcaaagttctttccatgcgcaacaaatcgaatcgtttagaggaactttttttgaaattaaccgaagaaaagcatgaagcgggggaaaaaaatgtttagtctttattttacagcattaaaaagtctagcggtcaaagaaaccaaccgctatttacggatttgggtccaaacactcgtaccaccagtgataacgacttcgttgtactttattatttttgggaaaatgattggcggccgtattggcgaaatgggcggcttctcctacatggaatttatcgttcccgggctgatcatgatgtcaacgatcaccagttcttacgcgaacgtttcgtcttctttcttttctcagaagtttcaaaagaatattgaggaacttttagttgcacccgtacctactcatgtgattatttggggatttgttttcggtggtttgggcagaagtatttttgttggtatgctggtcacagtgatttctctcttttttgttcctttgcatgttttttcttgggtaatggttattctgacattagtgatgaccgcaattcttttctcactagctggtttgctaaatggtatctttgcccaatcatttgacgatgtatcgatcgtgccaacgtttgtcctacagccactgacttatttaggaggcgtcttctattccatttcgatgctgccaccaatttggcaagctatttctaaagtgaatccaatcgtctatatgatctctggattccgttatggctttttgggcacaactgatgtgccgattttagtctctgttctgattctagttttattcataattgttttgtacggtatctgttggaaattaattgaaaaaggccgcggtctacgcagctaagaaactgacggctatctttcaataaaaacaggaaggctgtgccaagaactctcttagttcttggcacagcctttttctaattctttttgccttgtctttcgggactgacccaaacaccgctgccgtgtcccaaaattgttttgaccgctggtatgaaggtcgtaacgatcgttaaagcattgaccatccaataaatcagcatataaaatggtgcaaaaatgaaatacttgatttttctgccagcatcgtccaccaataaactagtcaacaactgcatgatcccagcaaccatttcaaaacaaacgaataggaaggccattgtcaccatatgatacattcgttcaatgtttccttcgaatgcaaaacgaagaaaagaaaagatgaacagtactgaagagatccaaaagaagatcgaccaaataatactcaatgtttgatccacaaacatgacggaccgaccaatattttgaaatggatgagtgaatacttttttgaaatttgtcagccagacttctgtaccgcctttttccaacgtttccgttggcgataaagcatcttcatggtctcaggaacttccatgaaaaacatgatccgcggagcaaacaaggacaaccagccttggaattggtgatcccaggcaatactgatatcctcggtggcacgattttggcggaagagtcccacatcgatcaaagcattttttcgatacatcgtgttggcaccgctgtatgcatagataacacctagcacgccttgttgcgtccgcttgataatacctacgatacttgaaaattcaacagtttgtgacttactgacaatcgtcgttcgattctgaacgtccatgtttgcagtgatcgctgaaatatttaccgcatcttggcgaataaagtaattgacatatttccagagtgcatcgggttccggtacagtatctgcatcgttactcaaaatcagttctccattagcaaaaccgatcccgatattaaaggcatgggcttttccttggtttttttggatgcataccactcgtagattagggtaggtttgctgcaaacgcttaaggatttctggtgtttgatccgttgagccatcatctgtgactaacacttcgtaacgggtataattcagtttattcattaagtaatgaatggtatctttaatgaccacttcttcattatgggcagggaccatagtcgtgatcattggctctacttcttcgggaatggggatccattcaatctgttgatgcttaaacaaatacgtatgacaaaggacgccaatgaaccaagcaaagccgcctaagattggataagtaaataaaatggccactaatagaaaaaggaagaaatccactatcgggtatcccgtatcgatttgttcaatcatagagagacccccttatctttatacaactttactatttctgtttccgttagattttgttccggtttcacttcataataacaaacagaatgccgcatctcttcaggaccaaaacggtcatcaaaaaattcttccaacacttctttgcgctgttcaagttttctttcatcatgcaagacttctttccgcaatgtatggcgaaaacgccgattgttcctcacggtcaacagaacaaaaagaataactaaaagaacgaaggaaattcctaaaaacaatgctaacaatctaaaaatagtggcttcctccacataggtcctaaatcgtatttgagcggctgtttgcggaaagaaaaccgggaaagcgacccaaacgaatggtacgatcacagcaatccacgcaagcagtgtcaaaaatgattgccacaacgttaactttaaatgtcctttttcaaaaaacaaatctgaaaccagctgttgactgacttcttctctggtgattctttttttcatcccacatcctccttttggctgtaactctcttctccatctatacatcgcttattactaaaaagaagcatcaaccctggtagcggtcacaaaaacacttaatcaataaaagctatatttgacctcttgtaggactaggtctaagcgagtatacctacattttagttgaatcgattcgaaagaaaaagaaactagcttgcgccagtttccttgtgatcctattcttttaattcgacttcctaaaaagaaaaccgctaacaacaatttcaaaagttatcaggcaagtccatttttttgaacacccacgaatcttgctttttagtaccctttcatccagacagattctaattgatttccgtccggatcaagcacttcaaaaccaagcatttcttcctctggaatccccatctctacttgaaacgactgtcccccattggcttcagccgctttagcaaagtctcgagctccttcaggtgtatcaaagctaaatgcgatcaaggcagcattcgtcttttgcgtatccgcaatctttctaccatttaaaaactgttcataaaacgcatattctgacagcatcacccaaatcgtctcattccacatcattccacttgatgtttcattcgaaaattcttcattcttgctaaagcccaacgcttcataaaaactagtagctcgcttgatatcttgaacaggcaaattgataaaaaccatctttcccatgctgtttcctcctttgacaaacccgagcgacatgtcattgctcctttattataaagggccgatccagatatacaaaacaatcaatttgaagctattttcacaaaaaatgcagcggcatttttcaggatgactccttttctccatgccagctgcattgtttcatatcgatttttccgtttgttttaaagacgatcccttctgctagcagccgctgctttcgttctacggcggtaaagcccacgatctcgccgtctgctcgtactacccgatgggctggtaatgactctgggcaatatttcatggcgcgtcctacagctcgtgcaccattcaagcgacctaaagcccaagctatttggctgtaagaagccactttgccatacggaatcttctttacgaaacgatacacctcttcataaaatggattcatacctatcaagcagctcctttcaatcgttagcgaatttgcttgttcgctcaatgtacgataacttgcatgccataaagggcatgttcataaaaccattttgcatctgcaacagtcaaacggatacacccatgagaattggctttttgtcctagttcttctgcttcttcttcaatgtaatctcccgaagcgtcaatcggcaccgaatgaaacaagtagacgccatgatctttccaagatacccaatagttcgctccctcgccagaagattcattaaaaaaagtttctcctctttcagcttgaatggaataagttcctgtaggcgttcttcggtctcctcctgatccggtagagcaaaccatcgtataaagcactcgattcttccgcatgatcttcacccgctggtttgccaatgagacatcgacccaatctccttcttgtaaaacaggataggctttcttctcagatggatgacgccaatctgcgacggctacttctgtcgaagaagaatcctctgaggatttagacgttcctgatctctcctttttagtaattgcattttttttcgtagggatcgttgcttttttaggaatggtctgtttggtctgttctgtagactggttcttctgaccagcggctacgttatgtgataggctggcactaacgatgaataacagcacagcactcacaaacataccaatggttcttttagggtatctttctttcattatttctatccttactaagccgtcgaaaaatctctcaggcacaatttccagttcattttaccaaagctgcttctaaaacgtgattttaatcagcagtgacaaaacaagttaacagcagatttcgtttcagcgtctcttaaaaaactcttgataaaatgatccattagcagtttaacgcctttgtaactaaaaagccagttaaaaatgaaagagtagaaccagcctacaacatcgtgcagcgcttcaaacggatgcggacaggcctcattcaatcgggtggtaactaaaccctcgtcctaaaacttcagctacattgctggcaattacaaatgcctgcggatcaatgctttcaatcaattgtttgatatcagcaaattcttgatcgttgacaacgatcaataaaacttgtttctcacttcttcgatgaacaccttgtgcttctaacaaggttgcccctctagaaattgccgttgcaatggccgcttgaatctcgtcaagatattcctcactcatgatcatcacagacttcttgcggtccatcccggtttcgatataattcatcacgatcgaagtaatcacaatcgaaagaatcgcaaacaaaaattcttcaaacccaaaaaccagtaaactcattgttaccacaaccgcatctgtggctaaaagcccgatggaaggattgatatggaaatatttctggaagatcagcggcggaatcgtagttccgccactagaagaattatttttatataaaatagcaaccccagcagcaaaaatcgcactcccaaaaataacagacagcagacgatcactggccaacatatattcaggcactacggcaattgctaacggaaaaactatgctgccgaacagcaccttgaagaaaggcgctttccccaaaaaaacataggccagaaccaacatcacactgttcagaaccatgatcacaagcgcacggtcccagcccaaagcagattccatcaagattccaatgccactgacccctccagctgcaatatgatgaggacctaaaaacatgttgatgctcaccgctagaatcaccagtgcagagagtattttactataagttatcaattgcttcattgtcttcctcttttctttgatcatccgaatagaagctgtcatttttccgagaacttgtgcttttactataccctcatctctgagttgagacaaaatttctgttcagaagactgaaactttttttcttataggatcaagtacaggtaagaaaaatttgctcaaaacttggttgttcaggaaccttttgacttgcgttctgacgttcattttctcacagaatcgttggaaaagagaagcatttttttcagccttctctgaaaatgatcatccagaatgctgctgcatttccatctttttgcacttgactctctttagagattcccttattatcaaggttaacgattttaaatcagaattttctgaatttttaggcgagataaacaaaatgaggaaggatgaaccatttgaagacaaacaaacaaaccacttggtctggcgaacccaacgaagcagcaatccaactgctccagcaagaaggcaaagtcatcgtttgccccactaaagtaggctatattattgccgtctctgacaagaaaggactagaacgcaagttttctgccaaaaatcgcaaacgtaataagccaggagttgtattatgcagctcattggaacaattacaagaattagcggaatggaacgatgaaattgcggcagtttaccaaaaatgttgggacaacgatgttctttttggcgcgatcttaccatggaaagagtctggaaaagcatatattcctgacggatcgcaagaattgatgatggataccagggaaacgagttgtttcgtcatcaaattcggcgttcctggagaacaaatcgctaaagctctttgggaggaaaagcaacagctattgtttgccagctcagcaaatccttctggtaaaggcaatcgtggtctggtggaaggaattggtgaacaaatcgctaacgaagcagacctcatcattgaaagcaatgactatgtcgcttcgatccaaccagataaaacgatagagacccgctacgaacaaggagtcatggtttctttcgtagattctgctggcaaattgattcctcatcaaggctctcagcgatcgatcaccccggcgcctgtattgattcggaagggtttagctgtagataaaatccaactgtttttgtccgatcacttcaattcctgggactatcgccacggcgaatactactaagcaattcatagattaggacatcagtccaagcattcaactaaccttagctacgactcttcgaccgtagctgagactttagatcgaactgcttacagctgatgtcctaattttttgagggtaattcttgcatacaacagcattttcctttcaatacaactcttcacagatcaaatcatttctttgatcgtcatgatagcgttccagatttaatgattcagcttactggttacatcagtcagtcccctgaaaacagcctcttcctaaagaatagagctactatttcttgatgatcatctgaatcgcttgttccagcttctgtgcttgttcttgaggatctttttctggattctcgaaacaatctttcaagttctctgcaacaatcatgcccatcacacgatcgatacttgaacgtaccgcacttaactgagtgatgatatcgatacattccttctcttcttcgatcattttttgaaccccacgaatctgcccttcggcacgttttaaacgattcagcacatttttttgatcacttcttgtcttatccatcgtctcactcctttcccattagaatataccctacaatggtataacggtcaaacattctattcgtatccgcaatgttaatcaaatcaaatcattgacaaatatagaaaaacggggtttaatataccccataccgtatataaaggagaatgtctatgttttcattgtttcgttctgtcccttccatctctattcgtgatttttccgcagcactaactgcaaaaacgaaagttattgatgtccggacgccctctgaataccggggtgggcatattcgaaatgccgccaatgtcccattaaataaaatcgcccactattcaggaaaaaaagaaccgttatatgtgatctgtcaatcaggcgtccgcagcaaacaagctgccaaattattgattaaaatgggctatgatgccacaacgattcgcggtggcatgaatcaatggcaaggaccaattcaaggaggaaaataaaatgaaagtactgattgtcggtggggtcgccggaggcatgtctgctgcaactcgattacgccgcttaatggaagatgctgaaatcattgttctagagaaaggtccttatgtgtcctttgcgaactgcggccttccttactttatcgcaggtgaaattactactcgcgatcaattactactgcaaacaccagagtccttaaaggcacgttttggtttggatgttcgtccaaatcaagaagtactggctattcacccagaacaaaagactgtgactatccatcgagattctgagacttatgaagaatcatatgacaagttgattcttgctccgggagcaaaagcaatcataccaaaaatcccaggattagaccgtgccacaaactgccgtcagttacgaaacgtgccggatatggatgctattttgcagaaaatcgatcaacatacccgccaagccgtcgtagtcggtgccggctttattggattggaaatggcagaaagtctgaaaaaccgtggcttagaggtaaccgtcgttgagaaagcatcgcaggttttaccttcgatggatgaagaaatggctgcctatgtcaaaaatgaattgatagcgaagggaatcaaggtcattacgggccaatccgcagtttcttttgaagaagaagggaaaaaaattcggttagaagatgacactgtactggactcagacctgacattattgtctatcggggtccaaccagaatcaagattagcagcggaagctgggatcactactggtattcgaggaggaatccttgtagacgaaaactaccaaacgtcgcaaaaagacatttacgctgtcggagatgctatcgtcacgaaacaacaactaactggagaagatgcgttgatttctttagcctcaccagctaaccgtcaaggccggcaagtcgcagacgtgatcgctggtctgccgaggaaaaaccgtggcaatattggaactgctatcctgcgagtctttgggcttacagcagccatgaccggattaagcgagaaagcagcagtatctgcgggcttgcagccagctgtgattcatgtcagcggaaaagatcatgctggctattaccctgatgctaaagatctgctattgaaattgatttttaataaagagacaggtactctctatggtgctcaggccgttggacagagtggcgtcgataaacgaatggatgtattagccacagccatcaaaagtggattgacggtggcagatttagcagaactggaactgagttatgcaccgccttttggttccgccaaagatccagtgaacctgatcggctatgcggcattgaatctaatcgaagggatcagtgagtcaatccagtggcatgaactttctgcagaattagctgccggcaaacaattactagatgtccgcaatacagcggaaatgactggccgcttcaaaaacgccctgcatattccgctgaatgaattacgagaccgactgactgaacttgatccgactgcttcttatatcgtcagctgtcatagcggactgcgaagctatttagccgaacggattctcaaacaatctggctacgaggcaaaaaatctagacggggcttttgcgctttatcaaaccgtcagaccggaggaaatcattcatgtatcgctcgatcacaatgcctgaattttatcaagcaagcaaacaacagaagttccacctgattgatgtcagagaagtcgatgaatttatcagcggccatgtaccaaatgcgcaaaataatccgttatctcacttcactactgccaatttggagaaagaccttgactactacgtgatttgtcactcaggtgctcggtcagagcaagcctgtcactatatggaccagcaagggttcaaggcgatcaatgtattaggcggcacttctgcttggccaggtgaactcgtttaaaacacgttacaccaaataaaacccaatgaccgctactttgatccaagtagcagtcattgggttttggtttaaactcgtcagctaactattcaaaaacaaattgattgtggtaaagttcggcataaaacccgttttctgccaataattcttgatggcttccttcttcgatgacttgcccctcccgcaagacaacgattcgatcggcattcaaaatcgtctttagacgatgggcgatgacaaaactggtccgccctttgatggcttcatccattgcttgctgaatctttgcttccgtcaccgtatcaacattactggtagcttcatccaaaatcaataaagatggattggtcaaaatcgtgcgagcgatactcatcaactgcttttgcccggtactgaatagattgttttcttccgtgattggtgtatcatacccttgttctaacgtcatgataaattcatggatgttggcctgttttgctgctgcaataatcgcttcctcactggcatccggcttaccaaaagcaatattttcccgaatcgtcccagaaaacagtaccgaatcttgcaacacgatccccacatgctcccgcaatgcatctaaatctaactgtcgaatgtcctgaccatcaaatgttactgagccattcgtcacatcatagaagcgattcaaaagattcatgatggttgtctttccagaaccagttggtcctaccaatgccaccatttcaccctttttgacatggatggtgacatctttaaggattaaacgatcactatcataaccgaaatcaacatgattcaatgccacttcttgcttgataccagtgattttttcaccatttgccggtttttcttcatccggttcatcaaacatctcattcaaacgacgggcgccagtgattgccaattgaatcatgctgtaaccagaagaaatctgcatcaacggttgatagtattgttgagaatattgaacgaaagtcaccacaaggcctagagcaactgaacgttccaaatccccattcaatgctaaccaaccgccaaagaaaatcacgatcgccgtgttgaccagcgacattccttgcatcattgggaaaagcaatcctgagtatacttgtcctttgtaagtggcttcccgaacactttggttgtgctgcaaaaatccatcaatcgtttcttcttgaagaccgttggtgatgatgatccgttggccgctgattttttcatcaatgtacccgtttagttttcctacttcatcttgctgcagatcgacatatttgcgagctttttggatcacaatgactgcaatcaggatggcaattggtgtagacgcaatcgtcgcccaagctaatgtgacattttgtcggaacatcatgatcaaaatcccgatcatcaataccacattggtcaatacttgcagcaatgcttgattcaagctgttttgaatgttatccaaatcgctggtaaaacgactcaaaatttcaccatcttgatgagaatcaaaaaatttgatcgtcaatttttccaatttattgaataacccgattcgcatccgattggtggatttccccaccacttgcgtgaacaagatactataaataaagtttgctccacttgccaatacgtaaaacagcagtaacttccagatgacagatacgaattttgacttgtcatctacgccttgcatcaatccaccaacataattcgctaattcctgaaaggcttgccccacatagaccggtgcttggacttgcagataagtggctgcaatcacggtaatgaaaatgaaaaagaaagagagtttgtatcgttttaaatagtgataaaaaaacttgcttgctttgatcaaatccgtcatggttattcagctcctttctgagtctcaaaaatttcctgataaattggattgttggcagctaactcttgatgggtacctactccaaccagacgacctttatccaacaccaggatgcggtccgcattcacaacagaagcaattttctgtgcaatgatgatcgtggtggtagcttgcagttctttttcaaaggcttcacgaaccagtttttccgaacgagcatccaatgcactcgtactatcatctagaatcaagatttttggttccccgatgacacctcgtgaaatagacagccgttgcttttgaccaccagaaaaattactgcttcgttccgctacgggtgcttcaaaacggttcgtcaatttttgaatgaattcacttgcctgcgcgatttctgttgcatgggtcatttcagggacagtggcgttctttttgccgtggcgcagattttgggcaatggttccggagaaaagaatcgctttttgtagaacaaaggaaacggtttgacgtaagctttgctcatttacttctcgtaaatcgacgcctccaactcgcacggttccttctgttggatcaaacaagcgcggaatcaattgagctaatgtcgatttccctgcaccagttgccccgacaatcccaatcatttctccaggagcgattgaaaaactgatgtctgtcaaagcatttttctcatccccaggataacggaaagaaacgtgctcgaatgccacactgcctgctaattcttgctgtggaacatctttgtaggacaagtctggttcggtaaccagaatttctttcaatcgtttgagagagaccgctgcccgagaagtcatcatcatcatcataccgccgataatgatcgccatcatgatctgcatcaaataattcatgaaagaagcgattcccccgatcaatgtcggatcgtcttttgcaaggtcgctgacaaagaagatcgcgcctacgaccgctaagttggctgccagcataaaggacggaatcatcacagagaaaagcgtaccaacgatgatgttgtgttttgttagttcgtcgctgactttcgtgaaactgttcaattgatttttttcttgaacaaatgatttcaccacacgaatccctaaaagattttcttttgctgcactattgattttgtcgatcaaattttgaatgatcatgaaatgtttgcccatctgtgtaaaagaaagaccagtaatgatcactactgcaacgatcaatgcgacgattacccaccaaagttgaggcatcgtggtcatggctaagataaaggcaccaataaataagaaaggaatccgaaacaacgactgcaaggagatcatcactaaattttggatttgggtgatgtcattggtcagtcgaaccaccagatttcctgctgagaatttctcgatattaccaaacgagaaagtttggattttacgaaaggcttcttcacgaatatccgcactgactccttgcgctactttggcagagaaaatagtattgatgaccccagccaccagcccaaacacggctagaccgatcaattggaccccaatcgatttcatttcattgtcgtcttctttaatgattgcttccaatacttgttgcagcagcttcggctgccataacgtagccagtaccatgacagctacagaaaccagcgcaatgaagacagcgcctttgtatttctttacatggcgtaaaacaagatccatcttaaaacacactcctttacagtttgacaggcattatttaacactgtaaaataaagccggacaataatttaccatttttagaaaaatgttgcaagcgaacaaaggatgatttttttatggaacaaaagttatcaaaagaatcaattattcatgcggcttttgcctacctaaaggaaacatctgacctttctcagttaaccatgcgcaaattggcaaaagtactttctgttcaagcaccggcattgtattggtatttcacgaataaacaagagctgttgcaagcgatggctgaaacgatggaaaatgatctgccggatgtccctgcgggtagctggcaagaacagttgcaaacctttatggccaattactacgatctctatctccaatatccctgtggtgcagaactagagattcatacgattccttcctatcctagccgactgctgcatttagagcaaatgatcactatattgatcgaagccggcttcactcctgcccaaagccgtcaaaccgttcaggcattgcatcatctcttattgggacacttactcgatcgtcaaaaagaagaacaattacgagcaaaaattgtaactggcgatgaaaaattgcgggcacatgtctctgctatgcgcagctatgttgttgagaatcatttaaatgggatggcagaaggcatccaacaacgcaaacaaatcgacgaacgtcaagtttttctggagagtatcgcgatttatctggctggcttaaacaagcgaaatacctctctaaaataaaaaaacgccaacaaatctcactaagtttccttaaatcgctttccgatttcaaggcacgaggctcgttggtgtttttgttgcgttttttaaagcgttgttagttcttctttttgttttttcgtcaatttctgataaaccagttcataagaggtcaaaatcaactgttcaatttgttcgtctgttacctcatccgctgctagacgaatagaattccagtgggttttattggcatagtatccgggaataatcgcctcagggtattgttcacgtaattcttcattgacttccggtttatttttcaacgtaatgatcgcatcatcattcgcttcaggactcatcataccaaactgtttgccgattagaccaaaataaatcgtcccccaatcctcacgataggccacattagcacctgccaatgactgaccgtaacttttcaggcgatcgattcgttgttggatctgattattcattgccatccctccggtttgaaactgattttttctttagtgtaccatatcttagagggtttctttcataagcaaactgttgatttagataaaaaaacagacccgctaagcgagtctgtgatacgtatgaatgtttggcttgattaataccaaccgttagcttcccagaatgcttttgctgcagaccatgaaccataacgtgaagcaacataattatcggctactttttcttgattggccgctgaatagtccccattcaagtaagagttagtcaactgataacgtccatagtattggccatttgttgctgtataagaaccgccagattctttgttcgcgatccattctttagctgaagcttctgagcctgttgctgcagaactgcttgatgcagatgagcttgggtttgtttgttggctgctggcaggttgtgaagctggttcttcataagtgactgatgattctgcagctgctgaagaacgttcatttgtatagctggcatcgtctgttggtaagaccagtgtttcaccaacatagatcaagtttttgttcgtaatgccgtttgcttcaacaattttatcaacggcttctgaggtgccaaaatagttataggcaatcgtagatagtgtatccccagattgcaccgtgtattcttcatcagcaaacgcatcttgtccacctagaaacacacccagacctgcaaggacagctgtactaagcaaaacagttttcaatgacttcataaaataattctcctcatcttgtagcgtttatagtctgtcgcaggagaaatctccaacgcatagactagtctaacaccagagaatatttcataggtgaaaatctcgttacagatgattacgaatgcgtcgagttccttacgtttcgtaagcgtcgcgtaattccttttgaatcaacaacgattatcaacataaaaatataaattagttattttatttcaataaaagtgaatcccctcttttttatttgtgaattgttacaaattggatgaatttacacacagtcgtaacaaaaaaagctgcagctgaacagcgcgtttccatgaatgcttgttgcatcgattggaagcaggcgttcacttgctgcagcatctttcgctgacactttatcaaaccgtttttttcactggaatcaacttattcatcacaatagcagcaatcgcacttaacgcaatcggtgaatccaataagtattgtagaaattgcggagtttcttgtttgatctcagccggcatgaacaaaagaccgatcgctaagattagcggaacaccaataatatagagttcacgttcagaaaactcttcattcttgatcactcgaaagccgctaagcaaaatgatcacacagacaactgcgaagacaccaccgattaccgctgaaggtacggcatggatcaacgctgataacttgccgacaaatgacaagaggatgaaccagcaggaagccatcacaaagacttttttactggcaaccccagtaatggaaatgataccggcatttgttgaataccccgtcactggtgtcgttcctactaaagcagccaccaggcaaccgattccttcaccaatgacacctttattgatttgttcatctgtcacagcttcctcagtgacagagctgacggcataccaagttcctgttgtttctgctagtaataccatataaatcaccagcatcgtcaaaatagctgaaacatcaaaatgaagaccataattgacgaaaataagttttggcaaactgaaaaatgaagcatccgcaacagactggaagcctacgccgcccatgaaccaagcaatcagcgtcccgatcattaaggcaataatcaccgagctaatccggaaatatttacctaaacgagggaagtaatcacctaacatcgagaataaaatcaaaattgctgctgtcactgcagccaaaaacatgttctgattagccgataatgtctcagtagctggataaatgttgctggtaaaagctgtaggtaacaatgtcagtccaacgatcatgataatcgtgccactgacgatcgtgggaataaagttgcggacaatatacttatagatccctgtcatccctaaaagaataacagccaatgccccgacaatactagctcctaagacagtatccataccttgcgctccaaaatagataccaatgattgcgcctactggtacaaaggacggcccttgacagacgggcaatttcaagaaaaagagaacttggatcagcgaagcaatcccagcacctaaaaaggtggattggatcagcccggctgcatccgacgagctcatggcaacagcagttgcaataataaagggtgggacatacacatccattgccaacacgtgttgtaagccaagaacaatggcttgtcctaaaggtatatcttcattcattccgatcgttaaacgattacttctggtttccacagtatcaatctcctcatttttcatgtactttttttccttgcacccagacctgacgaatgttttcagccgttgctagatacaaaatcttttgtaattgttctttcggttggttcagtacaccaaaagctggcaatggattaccagaataacaagtatcgatcacttgaaggtcgcaagcgtagccttccttgataagaccaatcggtagtcgtagcgcttcgccccctccttttgtcgccaatgaaaaagcgtcgatgactgagatacgcgcattcgcaacacctcgattcgtttggggcaatgtaacatccacaccgtcttctaacatgcgggaagacataacagcttgcttgatattgtcatacaaacttggagaaaagccgccggagatatctgtgcctagtccaatcgttacgccttgttctttaagccgattgatagggatcacaccattggcaaagtacgcattggaaatcgggcagtgagcaacagcagtccctgtttccacaaagatctcaccatctttttcatcgataaaattacaatgagccatcacagctttttctcccagtaagccaaaatcccgcaagacttctgtgtcggttttaccaaatcgttccaagacgtgatcgtgttcccattggccttcactgcaatgggattgtacatggacatcgtatttttgtgcgagttgtcctaacccagccagaccttcatccgtgcagcttgggacgaatcgtggtgtcactactggatagactccttgacgtgtcgtttttgccaacttttggacttctttaatgaaggtttcggtctctgctagtgccgtagcagttgaggcatctcgataaaaatctgggttcgcgtcgggatcatccatgactactttccccactagccctcgttgacccttctcagcacaaatcttggctaattgtaaacttgcttccaaatgaacggtcgcaaaataaagaaccgtcgttgttcctcgagccagtagttgcgcaactaaatcttggtacacttctgaagcaaaacttgagtccgcgtattttgcttccaacgggaaggtacactcatctagccatacattcaacggctcatccaatgcaactcctgcttgcggccattggggtgcatgaacgtgcaagtcgacgaatcccggtaaaaaatactgtcccttctgcaattcaactagcattccttgtttggcagctgccagcatttctggatagtctgattgttctgttgtgaccacccttttgatcatcccttcagcatccacgcaaatgaggacatcctctaagtattccagcacgccatctgtgggtgtatgaaatacagaacctttaaaatattttgttattgacataagttttctcctttaacaaactgcatcagactgctgctttgacattagcagttttcattaaaataagcatcaatggttttattttacattcattcggatttttttcaataaaaaccgtacattaatcctgacaaaaagaatctaatgttcgtttttaaggcaaaaaaagacatttggtgtgttcaccaaatgtctttccttcacttaaagctgaattgtcgtaccactattgccagctaaagtttccgccgctttttccaatgaagcgatcactgcttgacgcccatccttggaagcagcaaatgcgatcgctgcttccacttttggcaacatactaccaggtgcaaattgatttcggtcaatgtacgtttgcatttcagcgacagtggctgttgtcaatcctcgttgatctggttgaccatagttgacaaagacttggtcaacagcggttaagataataaagatatccgcatcgatcagtgccgccatcttggctgcagcaaagtctttgtcaatcaccgcgtcaactcctttatagcgagtgccttcataaaccactggtatgccgcctccgccacatgcaatcaccacttgacctgcatctactaatgtttttagactgattttttcataaatgtccactggtttaggagaaggaacgacccgacgccaacctcggcctgcatcttctatataagtgtcgccgctttcagtcattaattgctgagccttagcttcactatagtagccaccgattggtttcgttggattcgtaaaagctggatcagctggatcgaccaccacttgcgtcaacatggaaacgaccggaatattttccaacccgcgagaaacaagctcttcatcaatcgcttgttgcaaatggtaaccgatgtacccttgactcatagctgtgcattcaggaaatggcatgacgtcttcttgcgttttgctggtttcctcaaatgctaagcgaattttgccaacttgaggaccattcccgtgagcaatcaccacgtgatggccgtcactgattagatcagcaatcgattttgctgccacttgggctttggtcaattgttcgtgcgcagagtcgcctaaagcatttccgcctaaagcgatgacaattttcgacatacgtctcctcctatctttgcggttgttgttgcgtgatacagtgaatattcccgccaccgtatacgatctcaactgtatttacgcccacaacttctttatctgggaaaatctctgctatttcttcaagtgcccgcgcatcattttcgtctccgtattgaggaacgatcacaccgttgtttgtaattagaaagttcatataagaagcaatacaaatgtcgccatcttctcgcggcatggttccttctacgtaatcaatcttgaaatccccattgatcgtgacattttctactgggcagcaaagcttatgaacttttaatttgcggcctttggcatcggtcatttcattcaaacgcttgtatgcagcttgagccgcttcataaaatgggctgtttttatcttcagtatagatacaagccacttctccaggacgtacaaaacatgccacgtcatccacatgtccattggtttcttccggatcgatcccgtcagctaaccaaaggaccttctcacagttcaagtagtcgcataatttttgttcgatttctgcttttgtcatatgggggttccggccattactcaacaaacacatctccgtcgttaacacagtgccttccccatcgacatggaaggatcccccttctaaaataaacccttccgtccgataagaatccacttgctcgatctcacagatcttttgagcaactaaatcatcttgatcccaaggaaaatacaagccatcgactaatccgccccaagcattaaatccccagtcattgcctcgtaattcgcctttgtcgttgatgacaaagctaggaccacagtcacgaatccatgcatcgttattggacatttcatagacagtgatgtctgcaggcaattgacgacggcagttttgatattgttgttgcgacacgaccacattcattggcgtgaatttgctgatcgcttttgcgacttcagcaaatgcttcttgagctggtttgcccccatcacgccagttatccgggcgctctggccaaatcatccatactttctcttgtggttcaaactctccgggcattctaaacccgtcttgtttcggtgtggtcttttcgattcgtttcgccatgatacagcactccttcttttttgatttttttgatccagataatggcttcaccaacgagggcaaatacaattgctccaatcgtgattggtaattgctgactcagtgattcagcgtcaaattgcaaaggaagcgctgtgaaaatcaatgagatcacgatcatgatcatcggtagtgcgactaataccttcaagaacaaatcgctgccgctcaccttgaaaggtcgaggtgtgtctggatcaattttacgtaatttataaaacgcaggaaacacagggacatacgatagtaggaacattactaggttcagtgagaaaaatgcccagaataaatcttgatttggtaaaattggggcgatgacgacgacgatagaagcaacgataccattcataattgccgcaccagtaggcatgccattttttttgctgcgtttggcaaatactttcggcatatcgccattttcggccgcatagcaagcagtattattgacccctaacgaccaagaaatcatgttgccaaacaatgtcagcaagaacaaaaaggccatcgaaataatgaaccagccgcctgttgatcctgtcaataatttaaaactatccatcaatccactgccggtactgatttgatccgtaggaatcgctacaccgatcccgaaagcagaaaaaatgtaaatggcggcaatcaccagtccaccggcaatgatcgattgaggaatttgcttcttagggttttccatgtcacttgcaaatgtacaaatcacttcgaatcctaataagttaaaaatgattaccgagataaaagacaaactattcaaattgaagcttggcaccatcgaagaaagagtgaactcattcgcaacacctttggtaagggccgtatagagacctaagccaccaatcaagattgctaacagcatcttgatcactgctgccccattcaaaatccacacactgtcactgaccggataaaaactgatccaaacgatgacccatataaaaatcagttcgatcacgatagcagccaccgtggaaaattcacgacctgtgatagtcgtcaacaagtcaggacagactacggctagagaggctaaccataatggataattgatccagtagtaccaagaaacccgagaaccccagcgatgaccgaaagcttgtgtcacccaatcataaataccgccatcaccaatatacgttgttcctaattctgatgagattaacccatagggcaaaaggaacgcaaccaatagaaagatccaccaaaaaaactgtgaatttccgattgctgctaccggtgcagccgcttctgccacaaatacaacacaaataaccgataagatagcactcatcaaactaaattttttcttttctcccattgttttcttcctttccggtacaagggaataagggttgaccaacgattgaaggattcttgcaactagcggatttctctctcgtgaatcccagttcagcacataagctgcgacattattagaacgagcttccgctcaaaagaatcgattcgcagttcgttggcccctcctcaagaaccaaaacagtcttcacgcatccccttgatacgcagactatttcctttcctcatctcttgcgtctagtttcatctaacaaaacttccaagtctttttcagccgctgcttttttggtctcgtcgattggatttttatccgcataatctcgcatcaagtacactaagagaccgcgaatcgacgttaaccggttttctgcttcatcaaaacagatcgagtttggtccatccatgacctcatccgtgacttcttctccacgagtggcaggtaagcagtgcataaatttcgcttgttcaccagcgcgtttcatcaagtcagcgttcacttggtatttagggtaaaaaatacgcatgcgttcctcttctgataattctgcttcatacagtccataccaaacatctgtataaacaaaatccgaaccttcgatcacatcgatttgatctgatatcgtataggaaccgccagaatctttacaaatcgcgtctaatcgtgcgcgatggtcttcgtttaactggaacccttctggaccaaattgaacgaattccatccccatttttgttgcaatcaatcctaaagagaaacagacttgtgtggcatcaccaataaaggaaatcttgcagtcttcgatttttttgcctgctggaagatgttcgatcatggtgcaaagatcgccaagttcctgcgttggatggttgaagtcagacataccattaataactgggatcgtcgcattcgttgctaagtcatacacactatgatgccgttccacgcgagccatcaaaatgtcaactaaacgagaaagaacacggcttgtgtcttctattgtttcatgaccacccaattgaatttgtcctggtgcgagatattctgcatgtcctcctaattgtgtcattgctgtttcaaaagaaacccgagttctggtagatgattgttggaaaatcatccctaatactttgttctttagtaaaggggggtaataaccatttttgatggccgctttgattttcaatgacaggtcaacgatttgttggatctcctccttcgtgtaattttccgttgtaataaaatctcttttttccataatgaaacctcctaagtgatttgtttgcttttgcatcttcactttaggtaaaaaaggcggagtttacgataagctattagttgtaaacgttatcacacttattctatacttgctgaggacaagtttatttttggatataaaccagttattttccaagggtttacaaaagtttagaggaaagtttagcggaattaaaagtaaagaaaaaacaaatggtgttataattaggataagaaaattggtgtaagaaaaattgaaaggggattcaatatgatagctatttttatatacaatattttattgatcattctatattcaatcacgatgacttttgctatttattcttacttaaaagaaaaaaacaaattatttctttggattagtttgtatctggcattctttatttttgacaatacaattatttatatgacggaatttctcaattcctttgcccaaagttatgatcaagcatttatgagtgcaccagcagttaaaactattatatttatgggaaatgcctttttctccatttctattcttgccgaactacacaaagaaaaaacctctcccctccattatacgctattgatcgttttggccatttggatgattacgaccccactgatggaaaactcagcatttaaagtttggctctattatctgggtaatcaactcttccttttttatctaggaatttattgttggcaagggaccaaaaagaagctccctctactgaacaaacgctatttaaaacagttgatgatcatcaatctcttctttagtattttgatcataattgaagatagcttcgtgattttcaatgtcgaccagtacagctcgttagcgacaaagatttataatcgcagtatttcagaggatatcttttcgattgttgtttgtatattattactgcacttctttatcaaagaacgccaaccacaggaagaaaaaccgcaagagcaagacgcctctctcttgattcaaaacttttgccgtattcatcagtttacccaacgagaaacggaaatctttgcgttgctgttgtcccatcaaaccaatcaggaaatcgccgatcagctctttctttcattgggaacggtcaaaacccatgttcataacatttttatcaaacttgagataaaaaaacgcacgcaaattatgattctttttgaaaagtacaaagagacccatgaggcagctgcctaaaaaagacctggaaggatcgcttccaggccttttaaagtttaaaaaccagtcattcattgctctgaacggcttattcttccatatatgcatacttgatgatcgttgacggtccgaaagttggatagtacacacctttcagggaaggattgaccataatactacgagctctttggtagattgggacaatcccggcggtttcttctactaatagtttttctgctttgatcatcgtatcccaacgtgtcgctaaatcattggcataggtcgtattgctatcagcaatcaactggtcatagtctttattttcataattcgtgttattcggtgaaacgagattgtaaaggtacgtcatcgggtcttgataatctggtccccatgttccgatagctaactcgtaatcgctttttcgtgtcaattcaatcgaattattcaatgggacagacttgatttcaacggtcaagcccggtaagactgtctgtaactgatcctggatgaattcagccacttttttatctgcatcagtgtctttggttaacatctcgatggagatcttatccccaatatcagcagtggctttttgccagtaagcgagtgcagtggctttatccggtccttcgagaggcgcatcttctcgaaaatctttgccagtttccggattgaagacaaagttattcggaataaacccattgattgcttctgatccatctgataagacatctttgactaaagcttctttatcaatcgcataataaacggcttttcgtacattttcattggcaaagatcgtatctttaccatctcttttctgattcatcttgaaatagtggatataagaggtcagcaccgtctgtagttcttcgttagcggcattttgcttcacgtattccccataaatatccgccatatccaactgtccttcgttgaaaagattatatcctgtaacagcttctttgatcacttcataatggatattctccagtttgatggcatcacgattgtagtagtcttcatttttttccaaatcccatgtagaggaagcttgatcccaatttttcatcaaaaaggggccattagttaaaatattttcacttgatgtgccataagcatcccctttttcggtgacaaaagcttcattttgtggaaaaaatggagtaaaggccaatatcgaagtcaaataaggaactggctgttccaattggatctcgatcgtgtactcgtccgtagctttcgcacctagttcagaagggtctttttccccattgatgatttcggtgccatttttaaatgtaccgtccaataaaaacatgtagtttgcttgattggctggcgtggctagccgttgccaagcataaataaaatctttagccgtcactggctccccattactccaagtagcatcttctctcaacgtgatcgtgtaagtcagaccatcgtcggatatgttggggaaatctttggcgatagccggtgcgaccttattggtgtcatcgatttgatacaatccatcaaagacattgacttgggcattgatacttgccgtatcttgtgtagagagtgtatccattgatccgatttcgctttgttccatcaaattgaccacactgctcgcttgggcagtcgctttggattctttctgataactacaacctgaaaaaccgatgacgctagcaacaaccaacaaaaacatcattcttttttttcctttattcctcatttacgtcctccttttttacatgcgtcccaaccgcttatcgaagcgctttttctaaaatcgtcatctcaatcaattcagcttgccaatccagctcatcatatcggtagcctttcttggcagactcaaattctccccgctgattgtcgatggggtctgctcgtaagaattgcttcgctacggtaaatcccccttgaatacagttattagcaggtaagcgaaaaatatctaggtttccaaaataataaagccagcgctcttcatttccgcctcgaaatgcgctgcccccaaacgaaacatctacataaagccaaccgtactctggtagatagaagcgcgcccagtcatgagggcccacaaaaaattctgaaacatataaacccgactcccattcagctgggatattcgccatacgacacaaagtgataaataaaagtgcttgaaccccgcagtctcctttctgattgactgcgcagtactcactgatattcggaatcgcataatattctcgcataaatgaataggtcactttggtggtcacaaaatgataaatcgcatacgcacgttccaagggattttttgcttccggcaaaatttcctgcaataattgctgtagaaaaggcgtaaattgaatatggggagcgaattcattgagcgctgatgcaaatgcgtttttttccgactcagtcaactcacgaatcatggtttgctcatccaacaactggaataaatccgtataaacagccgtcaattcatagctgtgttccacagtcgcttcaattgaggaagggtcgttggtttcaaatgcgatcgttcgctgtggtgcagcgaagggatcaatctgcttgaccgctccttttgtctgaagaatcttggcatttgctacctttccagtgtctcgaggcaaaggaatgtgcgtcaagaaaggaccgtcttctttattaagcgttgttagtggtctaagtgattgtttcaaaacgattcgagcagtcctttgtccgagttgtttcattttttctacattctcatccagttctacttgtctggcactgtcaattccgttttcttcctcaaataaatagcgcgtataatagtctgagcgcgtcttaacgagattagcaataaagcgttcatggaaaacttttttgccgttcaagtagatccattcaacctctcctgcttccactaagcgatccagttcttctcgctgaaaatcgacaaaggactgttgcatcatctccagagctttcgtttcttcatagggatattgctttgcttcaaaaacagtcaaaacctttaattccgtttgcaaacgatcttttaagacttcactgatacgggcattgttcagcttctgatgaatgagtctacgtgttaaagaaaaatcaccaaaatctttggctcgttgaatgtcttctggcaaaggaaccactagattggatagatcattaggatccatactcactgcgccacctcctctttttgtttaacgcctaatccagccgcttcattaagttgaatcaccggtgttttttctgtaccaacaaccccttcatacgcaagaactgctaaatcaaacgtcgcgtcaaggtcagcgaaacgaacatttttttgtgcagcaacaaagtgagctgccgctgcgatactaatattggtctcccctgccatacaacctaccatacaagggatattcgcagcttcgcaaatactattgatctgtaacgctggatagatgccgccacatttcatcaatttgatattgacagcatctactgcatcttttttgatcaatgataacgcatcttggggtacaaatgccgcttcatctgccatgatctgttggttgacttgagttctgataaaggctaatccatcaatgtcactagcaggtgttggttgctcaaaaaaagcgatgtcatatttctgcaactgttcaatcatttttattgcctgctttgctcgccaaccttggttggcatcaattctcaattcgatggctggaccgacagctgcccgaatttgttttactcgttcaatatcgtctttctcatccaatccgactttgatcttcagtgcagtaaatccttgttccacaaacaattgagcattctctgccatcacttctggagtatcgatggaaatcgtcatatctgtctctacttggttatcctgaccgcctaacaactggtacaaaggcagtcctgtactttttcccaatagatcatagcaagccatatcgagagctgctttggcagacccattgcctttcaggcactggttcatgatgctatggatccggcttaattgccgtggatcttctccagttaatgcatcagccaataactttagagcagcttcacagccttcaagtgtctcccctgtcactaagggttcaggtgttgcctcaccgatcccaaagtcccctgtgtcagtgatcactttaatggtcaaattgctgacctcagtaataacgcctaatgcaattttaaatggcttgcgcagcatcattttatttgcagcaatttccacacgttcaattttcatcttcattcccccctctaacttaaaactgactatatcattccgtttttttcttttcaacactttttctgaattttctgaattttatttttatacagattatgcataactctaccaacttatctcctttgagcagtaaatttaataacaaaaaaagagcaaaaatttgctcttttaatcagataattgtattttattaataatcgtcggatgccaacgaacattgatttgtttgattgtatcaagcggacactttggttgtcgatcagctgttaacaaaccgtttttttcctgttccacatccgtcaactgcgtataacaaaagccgtgaagaatttctgactgatagacagcatcaatcacccgctgatagtcctgaataaactctgcttcattagctgcattggtatatccccagccttgagcccctgtatcatagccgatcccgccaaattctgttaacaagataggaacatcttgatgttgaaatcctggacaataaatttttctgcgattgggttcagaagttaaaatcgtatcttttgttcgcaaactcgccgcaaaatggtcgtatttctccagttcttctttcgttccatgaacatagctgtgaatcccacaaatatcactttctgtcatctcccagccatcatttgagataaccaatcgagtaggatctaaagaatggatcaagtgataaatcgcctgcgaaaaatgctgttgctgacgatcgacactaatgttcggtaccccccagctttcattgatcggtacccaagttgtgatacaaggatgattgtagtcacggtcgatgatctcttgccattcagccatcactttccccccgctagttcgtgtataaacactcggtgaggcacattctccccaaacaatgaatcctaactgatctgcccaaaacaaaaaacgggggtcctctactttttgatgtttgcgacagccgttgaagcccattgctttggctaattcgatatctttcttgtaatcttcatctgtaggagctgtcatgagacttgtgggccagtagccctgatccaacactagtttctgataatacgggcggttatttaagtggaccatgccatcttgaatatgaatttttcgcatgccaaaatagcttttaacggtatcgatacactttccttgtgaccaaacatcaaagacgacatcaaagagattcggggtctctggagtccaagtccatccgcgaccgtgaaagtcactgcggtcgatcttttgattgaatagactgtaagagcgtgtgaactggtgctcggtcaactgctggcgatcagaaacgatcagctcttcgccgtaataaattctggtacacaattctttatccgtcaaatcaccagcataatgataggcgatctctacggatccccgatcaaactcactggtataaaagaccttttctaaatagccgtttttgtcaactgcctccaaccacaccgtctgccagatacccgttgttcgggtataccagatagcagcagaatgttcctgccaatattgcttgcctcttggtatttcttcatctgttgatggatcaaagacctttagtgtgagcagatctttgtcaaaggtcaaatagtgagtcacatcaaaagaaaatgaggtgtgtccgccaatgtgttcccctactaactgatggttgatgtagacccagcaatggtaatcgacagcgccgaaatgtaacaataaacgtttgtcttgccaagtatctggcaccatcagctctcgctgataccaaacaccgtcatgaaagcttttgatttcaattccactttgcttggactgaaagacataaggaacttcgatcatctgtgtcaatgcttgtggctgttgttcctctaagttgtcggtaaaatcaaattgccacttaccgtttaaattcagccatttccttcgttcaaattgtgggcgcggatattctggtctgttcatagtcgtcctttccttttcaattttttttattacgaggcaaactagcctttgcttccagaagtaagactgattccttgaatgaaatacttttgaccgaagaaaaacaagactaacgcaggaatcgtcattaatgtagaagccgccatcatgatattccattgagaagaaaattgcccttttagttgcaataatccgagagctaatgtttgtttgctaggatcattcaagtaaatcaaggggccaaaaaaatcattccaagtattcataaacgtaaaaaatcctacaaccatcatggcaggtttaactaacggaagcatgatcttataaaaaatctgccagtgggttgcaccatccaggatcgccgcttcatctaattcttttgggataccagcaaaaaattgtcgcatcaaaaagacattgaacccaccaccgccaaaaaaggctggggcgatcaaaggtacaaaggaatttacaaatcctaatttattccacatcataaatgtcggaatcaacgtcactgcacctggaagcatcattgtcgcaatgaccatcgcaaaccacatattcttgtatttaaagttcaagcggccaaatgcgtaaccgcataagcaagaagtaaagacattcccgataatgcagggaataataatcaaaaacgtgttaacgagataggtctttagatccaaaacttgaaagacatctgcgtagttagaaaataataattgatcaggcagccacttaggggggaactcaaaaatttcataggaatccataaacgagctgcgtactagccataaaaatggaaccaatgagatcagtccaatcaccactaatggaacatacatcatgtattttgcttttctcatggtcatttttcttgccctccataatacacccaattttttgccgtaccaaaaaccagcatcgtaaacaaaccaataatcacaaataggatccatgctaatgcggatgcataaccaaactgattttcttggaatgctttccggtagatcaacaatgcgtaaaacaaggtcgcattattggggccgcctccagtcataatgtatgcttgcgagaatgtctggaaagacccaatcaaccccatcaccaagttaaagaaaatgatgggagagatggctggcaatgtcacatacaaaaatttatggcgccaattgccgccatctacttccacagcctccattaggtcttggggaacatcctgcagcccagctaagaaaaccagagcggtaccgccacatccccatacggccattaaaatcaaagatgggatcgctgtttgttcatcaaaaatccagttagacggcggcaaatggaaaaattgcaaaacagaattcagcaagccaaaatccgggttgaataaccacatccataaaatgtttgaagccaccgctggaactaccaccggcaagtagaacaatgttcgaaaaaatgcctgtcctcgaactttgacattcatcaacaatgcgatcactagtgcagcgatcaaactacttagcgtactgccaaaagcaaaggtgaatgtcacaaccaccgattttttgaaaaaaagatcatccataaaaatcgtacggtagttatcgatgccggtaaatttgaaatcaccgatgacattataatctgtaaaactaagaatcagactaacgatcattgggatgatggtaaaaatcaataatccgagaattgcaggggctgcaaaagcataccctgcacgattctcttctttgtgtaaatcatattgtttctttttagattgttcatctgttttaagtgtgatcattccttcgtccacctacttcacatactcgtatttgtccccgaactgtttctctagttttggcaaaatgtcttcctcaactacttctcttggagctttcttgccagtccagacctgttctaacgcggggttcacgatttgctcgatcgaagcagcatcttcactgtagaaggccttgttttttgtcaacgcttgctctttcgcttcaaccagtgcttcttttttatattctggtgaacgatcgcttacggcccatttttgaaggtacgtttcatctgagaaccaattgtcttggttaggtaaccataatcctgaatcgatgacatctaaactattctcagggtctaaaagatactctaaaaatgttttggtttcttcccaatgttcttgtgtgttttcattatcaaaaaccacgattggcggaccaaaattcatttgaacgacttttcccatttttggtaaaacacccatacctaacgctaaccctttttgttcgatagcgtcccccagggaacgtaagtcccaagatcctgtgatcgtcatcgctactctatctgtcagcattgcggtatcagttgaaggaatcgtacttgcctgtgagggtttcggcatcacataatctttgtacatcaaatcctgaattttctctaacgcttcaatcgaagcatctgttccaatcaggatttttttgccgtcctgactaagcaccccaccgccattgctgattaagaaagattcatagcctagaccagtaaaattggagatcccataggttttgatatttttttcgtcaaaaccagcatcgcctggatgattgccatttcggtcgactgtcagttctttcagaatggatacaaatttatcccaatcccacgcttgattgacgtcatgaggtggaacttcaacccccttttcttcaaaatatttcgtactgtagaacagtgtaagcattcctggccctgcaggcgatccaaagactttcccgttgtactccgagcgtgtctctgcgattttgttctcaaatggtcctcctgattcatacagctctgtcagatcccttaagttgccgctcttcccccactctgccgtgcttgtttcaaccatatagccgacatctggaagtgttttggtactagcttgtgtgtttagcttctccatataattgtcataagggatctgctgcgcttttacttggatctcgtcttgtgattcattaaagtttttgattaatttatcgatcgaagctttctccaatgtatcgccccaaaaagaaaaattgagggtaactttactcgcttgatcaccagcatcattattgctcccacatcccgataataaaaaacttccgcctataaccaatgaggaaatgagtagaccaatttttttcatcttctttgctcctgcctttttatattccatttgtatgcgcatacaatagttcaaaaagaaaatcagacggattattttttacaaaatgattgcttcatgttgccaaaataatgctgtctgtttttctttacaatttatactatacaaaacgaaaatacatatttcttcccgagttatgtgttccttattcccgatttttgtttggctctattttctaaattagaaatcgattacatttattctatcaggcacatcacacagtaaaataaagagagcaacaccgcatcactatctatagaacaaaggagtagaatacatgagcttatacttggaaattcctgaaatcaatccgctgttccctttcaaaacctttacaaatgaagggtggtcgatcacttatcctcactggcacaaagaaattgaatttatttattgtttggaaggaactgtcagattaggggtggatgacgagatcattcaaatgcatgtagacgagatctattttttttctagtggtgaaccgcacttcttcttgtcttcgccaaatagtgaacgaatcgtttatcaatttgatatcaaactctttcaagggcatgacaatatctcgccaaatgatcgtccattggccaaagtatttgagaccgtcgtcaattacagtaaagattggcctaccccgatccaaaaagagatccagactatcttgctttctatttatcatgaaaaccagaaacagcgtgaagggtatcaatacagtattttgagcagtttgtataaattagcgaatctcttgtaccaactgccattgaagaacaaaaaaacagaaaaagccgctttagatagtacattaaaaaatcgcgagacattgttccagatcgacaccatcctcgactatattgagtccaattatttacatgcgatcacgattcaggatgttgctgatcatgtggggtttagtcctagttatttctcacgcttcttcaaaaaaaatatcgggatgtcttttaccagttatctggcagaataccgcatccatcgggcaaagtatattttaggaacagagctggttcccatggcagaagtagctgcccgctcaggtttttctagcgtcaaaacctttcatcacgtctttaaatcaatggttggcacttctcctatgaaatttcaaaaaaatattttcggctttcactaaataactacgcaagaaacctatatagtcaccaaatcggcgaattctgcatttataacattttgtccaaattaggcaacgcccaaccataaaaaagagatctggaagcatcagatctcttttttattcactctaaattgaagtcctcaaaaaaagaatcaattggtttttttaccaattgattcttgcgaatgatccagcaaacagttgctcacggcttacaacctcagagcggttgctgacatctgctcattatagaatgttgtcatgctctatttacagaccttctttcagatgttctttgctagtttttctcacccagatgtctttaccagtttgttcaataaataattcagtttcaggagctagctgacactcaactttaccttcctttaaagtaattcgcaattcttccccttgataaaaaagcttaaaggcaagttctgttatttcttttggtaggtgattggacaagcgaatgccttcatcataataaagaccagcaaaaccataaatcaaacttagccagctgcctcccatatttgccccatggatgccatcgacgacgtttttttgcagatcagtcaaatccatcaatgccgtatccatgaaatagcgatatgcttttgctgtttctccgatacgactagccatcacactgaaaatcgaacgagacagcgaagaatcatgggtggtgactttttcataatactgataatcttgttttagttgttctagggtaaaatcacccgtaaaaagcatttgcgctaatacggtatccgcttgtttgcagacttgatgtttgtaaattatcatcggatgataatgcaacaataaaggatagttagcagctggtgtctcttcaaaaggccagacagattgttcaagaaactcatcatcttgcttggtaagtccacgagacgcatcataaccgaaatacatgaggtctgcggcttgctgccattgatcgatcagttccatatgcttttcgtatcgtttcgccagttcaatggcataatataaattgttttgagccattttgttggtataaaagttattgttgaccaatgcactgtattcatcaggtccggtgaccccattgatacaaaaagaaggtttgccgtctttttcgatgaaatcaccataactcaaccaaaattttgccgtttcgaaaacgacttcactgccgacttcttcaataaagcggacatctcctgtgacccgttcatagagttgaaaagcataaacgatatcggcattgatatgcagttgtgcggttccggcaggataataggcactcgtttcttgaccatcaatggtgcgccatgcaaacagtgcaccgtcttggctcagctcttgtgcccgtttttgcgcttgcggtaaaatagttgctcgataagtaagcaatgctttcgcagtgtctggattggtgtaagtaaaaaaaggcaacaaatacatttcagtatcccaaaaataatgaccttcatacccttcacctgtcaaccccttggcagcaaaattggttctgccatcacgtcctgccccctgattcaggtgaaacagattgaagcggatccccttttgtagttcttgatcacccgtgatttcgatatcactcgctgcccaaaactgctgatagctttccctctgttcggcaacaaatgtttcaaaatcaaccgcttcttgataaaagggtgcgccctctgcttcttgtaatcgcagttgaaaaatcgtcgtcagggattctccagattggatttgcccatcgccgcctatcacccgaatcgccagttttttttgactatgaggggctgtccaaatggcatagtcgccatgctcttctttcagaagctgatgctctttattcgcaacacgaggatcatctgtttgattgactgtgaagcgctggtccaatggatgggaaacagtgattggctctgtgaaatttgcatttttgattgtgtaacgacaaacataaaattcactgcgcgtcatggaggcaaaagattgcatctcaagatcaaagcttttgcctaatggggtttctacatggtaagactcatgaaggatgccttctgccatatctaatgtcagctggatttgttccgtctgccaaacgctgtccgacgactgctcttgtccgatgcttaaagaaagcccccgcaggttgggtaacttgcagatggtttggtgttctttagcatagccataagcccattcgccgtattggatcggttcactgtcaaaaaaaccattgacaaaagccccgggattcccaggatagttcgcattcactttaaggggatgccctgctcggacaccgatttgaccattccccacagcgaacagcgtttctaaatattccggtttctgatgagagagttcttgtgcctgcaataaaaatcgtttgtccatctctgttcgtctcctccgcttttttctttcagttctatcctacactactaaacacccattgcaaagaatccgacttcagctgggaggggcatctactttggttcttctgacagagtatggtaccatgaaacaaacttgaaagaaggcgattacttggatttatggctaacaaatattcgaatggaaacaagctacatcaaagaaaatggctggtcctctggcagccaaaccaaacgggcggcgattgggatcagtgaagaaaaaattaccgagatccttcccatggatgaatggaaagacacgccaggaataactgttatcgatggtcaaggccagttattgttacccggcttgattgaaaaacactgccatttggataaaagcaaattaggaactccatggcgtcctgtcacaccggcagccaacttagtagaacgttttgaaacagagattcctcaattggatgcattgcctctttcgattaaagaacgggcacaacaattgatcgatttggaattgcctcatggtgtcgtgtcctttcgctcccatattgatattgaaccaatgactgaactgcgctattttgatgcactaactgaattgcttgctgacaaaccatttggtacggaacttgttttgttcccgcaacacggtctgctgcgatcaaatgccgtcgcattaatcgaagaagcattagctactggtaaagctgcattcattggtggggtcgatccttatacattagatcaagattatcagcaatcattaaaaacaacctttgagctggcaaaaaaaggcaatgttggcatagacattcatctacatgaccgcaaagaagccggtcgtgcaacgatcaaagaaatcattcggctgaccaaagaatatgctatggcaggcaatgtcttcatcagccatgcctttggcttaaatgattttgaaggagctgaacgcacagaagtttttcaagctttagcagatcaggacattcatatcgtttcaagtattccaatcagtcagggaacgattcctccccttaaagaattacaaagttatggggttgctgttcacattggttgtgacaatatttatgattcttggtcatcactgggtgacggctccttgcaagaaaagctcgctcgttatttagagatttttggcgttcaatcacaagaggcattgacccaggcattaggcttggtaacagatggcagagtgccattagatcaagaaggaaatcaacaatggccaaaagttggcgattctgctgattttcttttgacccctgtttcttcaacggctgaatttgtcgcccgcaaaggtcacgtcagctgcagtttctttaaaggacaaccaatctacaacgcataaccaataattattgacaaaaaatgattcggtcacctctcttttgctgatttcgcttgacgctgatccgattattcggtttacttatgatagcgaatacaaaaagtgagggattaccatgtatactgcaaatatgcaacgatatgaacgcatgacatataaccgtgtcggaaaatcaggtttaaatcttcctgcaatttcccttggtctatggcacaacttcggtgatacagatccaattgcgaaacagcgggaaacgatcttaggagcctttgatctaggcattacccattttgatttggccaacaactatggtccccctgcaggatcggcagaaaagaatttcggccgcattttaaaagaagacttacaggcttatcgggatgaattgattatttcatcaaaggctggttactatatgtggcctggtccctatggtgaatggggttctaagaagaatttgattgccagctgtgatcaaagcctgcaacgtctaggcctagattatgtcgatattttttaccatcatcgcccagatccagacacaccattggcagaaacggctcatgcactggacttggtagtacggcaaggaaaagccctctatgttggtgtatccaattattctgcagaacaaacaaaagaaatcgccaagattttgaaggatcaaggaaccccctttatcatccatcaacctcgctacaatatgtttgatcgttggatcgaagatggattaacagctgtcttagaagaggaaggattaggtgcgatcgtctttagccctctggcacaaggattattgactgatcgttatctgcatggtattcccgaagactctcgagcgcatcgctcagatagtccttttttaacagaagatcgtgtagctccaaccttaaatgtagtcagacaattgaatgatattgctcaagagcgaggacaaagtttggcagaaatggcattagcttggctgttgcgtcaagagactgttgctagcgtattgattggtgcttctcgtttgagtcaactacaagcaaatgtccgggctttggaccaattaactttttctgctgaagaactaaaaaagatcgacgaaattttagtgcttttaaagaaataagcgtttgatttgctcgctggcctttcccatgggggaactgccccgcattgagtaaaatggcggaaacttcatttcaaacaacaaagaaatcaaacgaccgcagtgtgtattgtccagaagctattaatgcttcgatgcaataaccctcgcggtcgtttggttcttttttgctacattttagttgattgattctttttgccaatcaatggctaattgcaggcagcctttgatgccactttcattcactagttgccatggaacaatgtactcttctacacttggaatcgaaatgtagccccctagttccagcaaaaattgttctctgatttttgacagcaagtgggtctgattcatgacaccaccgcctaaaataatcttatctggtacaaaggacaatgtataattgaccaatgcttgcgctatataataggcttgcagctcccatacaggatgattttcaagaagagtctctcccttttgccccgttcgtgcttcgatggaaggaccggcagccagcccttcaaagcaatcctgatgataagggcaagtgccgacatatgaatcctctgggtgccgtttgatccggatatgccccatttcaggataagatttgccttggaataactggttattcacgattacgccggcaccgatcccagtccccaccgtcagataaatacaggtatcgcagtcttgagcagcccctttttttaattccccataggctgctgcattgacatctgttgtccaaaccattggaatcggatagcgttgttttaacgtccccaaaaagtcaaaattttgccatcccgctttaggtgttgccaaaacatgcccatagttggcttgcttggggtccaatccgattggaccaaagctgccgatccccatcgcggccagctcatacctatcaaaaaatcggaaaatttcggccagtgtttctgcgggttctctcgtagcgattcgctgtgaagcaataatcttcccctcttgatccgctactgaacagttcatttttgttccgcctgcttctatgcctccatacatcattgcctatccctacttttctactcgaatatcgaaataatccattactagctcacaaaacatcatgtttgcccaagaaaaccattcacgagtgtaatccgttggatcattgacattgataccctcatgcatcaaatgcgttcctgcatcgatcgctaccaactgatctaaaatttgggctttttcttctttgtttggtgtcgtcaatccagtcatcgccatcgcgatcggccaaacaaaattatgcggtgtatgagatgagccgatcccactagcaaattcgccttgatagtaataaggattttcgtcacttaaaagtgtttttctcgtagctagataagttggatcttccatggagccatagcctagataaggtgcagaaatcaggttaggtacattgctgtcgtccatgacagaggcattgcctaacccatccacttcataggcatagatcgtttcgccagcttgattcgtcgtatacgcatatttttcgatccccgcttggatctcttgctttaaatcggctgcttcggccactaattcaggcacatctaaaatgtcggagaaaatcagttccaaataacctaatatcacaacagcgaacatgtttgacggaatcaaatagccatagacacaagcgtcgtcgcttggacgaaatcctgaccaagtcatcccagttttagcaactggggttcctttgccggcgaacttcagcgtatcttcttgacgttctgtttggcgctcaaattgatatggtgactgcgcgtgatcttgttctgtccgaaagacggttaggacttttttgaccccttcaataaagtttttatcaaagtgatcggtgcgccaggtgtttttataaagtagataggctaactggatcggatagcacaatgaatcgatctcatatttccgttcccagatccagccgttcatttcggttagatcatcttggtgtccggcaaaattttctgtttcattgaaggcattggcgtaaggatcgatagtgataaacataaattgctttttgactaatccggcaatcatatcagacagttcttgatcatcttttgctaaacacaggtacggacggacttgagcggttgaatctcgcagccacattgcaggaatatcacctgtcaaaacaaaggtactgccatcttcttgcttcttgacagtggttaatacggtattggcaaatgccgcattaaagttttccgcccaattttcatggtcttcgccacaaagcaacgtgattttctccataaaactcttaattactttcggtatttcgctgtatcccatcttcttttccccttttacaaagaagagccgacaaaagtagacaaagccgctggtctttctgcaacgagaagcttcgggtagttgatgttcaagactgttcaatcctccatcctatgcccgatttgctaagaatgaaccaaccttcgctgatcttgaaaatctgctgccagtcctttcgctttgtctactgatatttctcttcaaactttaaatgattgcagcactttctaatgccatgacccctgataattggtcagacaagaaaacactagttggaatttctgcgactaaccagtctcggtaagctaacagatgtccttccttctgactatgctctaacaagcgttcacagctggatgtcacaaatcctttgatggaggctatgtctaagcccactttttctgcttctttgactaagagattcaaataacggtattcaatgcctttgaacaatccaatgtcaccaccatctccttcatcattgaagaccccatctttaccaataacttcaaaggatgttttggcacaagtgattgcatcttttaaataagaaatatcgtcagtcacatgataaaattctatcaatgctccaatatagaccccttggttgtaagtaaatttccattgcacatcgattttgccatcgccattacgattgataccatcttctacgaattgtgtgtccggctgtaccaaatattttttcatccattctagtgtctgttggcttgtagtcagatagcgttcattggcttcaacttgatacagacgtaatgctagaataataattggtgcatttacaggtgtattcttatagtcaagctgcgtgcgtttccaagcaaatccgccattcatatgatcattccaagcagtatcaaaaatatccagacatacttctcgggcgtcagctaggtattcttttttcttagtcaagtcatacaaacgtaatccagctaatgcgttccacaacatgtcatcataaaattcatgcagcaatgtgttatggtttcttgctttattgtaatgataggtttcttctgcttgctgcaagtaagccatatcgttggtccgcagataagcatcaatgcgtacatccactaaatgcgcgatccaccagtaattgaaggtttcattttctttctcatcccgcaatggataaacgttgttcataaattgttctttggaagctgcttgatagaaataatcgatacttgtttgtgcaagatcggcatacttgttaaaatcggtcattctcctgatccttctttcaatattttgtcaccttgttgttgagcattttctagtgctttttgcggcgttgtttttccagaaaagacattttctaattgtggaataagggctagtttttcgacatcggaataccccataacagttggtcgaattttagcaaaatccatggtttccacaaaagctttgtacttctcattttcagtaaagtaggtattttgcgctgcttcgatatttgctggtagccaagtggaaatttttgcaaactcgacaccgatatctgggttggtcgtccaccatttaataaagtcccaagctgcttcttggtttttggccgttttgggaatcactaaaccaaagccacccgtcaacgcccctttgtccccatttggtccagttactggagggacgaccccataatccaagccattcactttatcataatctgctaatgcccaaggtccgttataggtcatcgcaactttaccagctgcaaatgcatcagatccatcattaaatccttgttgatagaccttcgcttgattcattaattgatcccagaaatcaagaacggtcattcctgcctcagaattaaaagcagtggcagtattatcagcgttcagcatggttccgccagcttgctgcaaccacatattgaacaatccaacgtcatcaagagaaaaaccagcttgcactaacgtttttccatcccattttgttgttttcttcgcaacatccaacaactcatcccaagtctttggtggttctactccagcttctttcagtaatgttttgttataaaagagagagcggttgtctactaaaagtgggattccatattgtttattgtcgtattgcatttctttgacagtttcttcataaaaatcgcccatatctacattgtcttttttgatcaaatcatctagatccaataaggcattttttttggcatacatcgctgtattgacgcgatcccacaagataacatctggaatttcgccacccgccattccggtcagcagcttttcttcaacgttgtcttgaactttgtaggtcacctcgtatttgtcttggctatcattgtattgatcgatcaattgattgagctgatcgacttggtcaccactccaagaaccccaaaaagtgattttctgctttccgccagctccatcattgcttgcctgatcattgcctccaccacatgcacctaacactgtcatcgctgctactaacagcaatcctttgattatgtttttcatcacattcactccttcgttttatttgataccggcatctgccatgccttgtacataatttcgttgtgcaaaaatgaatagaactaaaacaggtagtgttgccaaaatcgttcctgccatcaatggaccataatttgtattgtagttgtattggaaagctgccagtccaacttggaccgttttcatttcatctgcattcaagacaatcatcggccacataaaggcattccagcctgcttgaaaagtcataatacctagcgttgtcaaagcaggttttgctagcggaaaataaacattccagaaaatcttgaactcacttgcaccatcgattcgagcactttctccgagttcttttggtaattgttcgaagaattgtttcataaagaaaatcgagaacgctcctgctgctccgggaagcaggattgcccaataggaattgatcaatcctaacccaccagtaccagttagatcattccctccagccaacgggaatccgcgaagcacaataaaggttggaatcattgtgacaatacttggaaccatcattgaagctagaaaaacgagaaagattggtttcttccctttgaatttcagctgaccaaaagaataaccagctaatgaaccaaaaaataaatttgtcgctacacccccaagtgctaatatcaatgaattttttaaatagtttaagaaaggcatcgtttcaaaaacttctttataatgatcccaagtaaagtggcttggaatgatttgcatcgatccgctgagaatctcgctatcggatttaaaggatgtcgacaaggtccagataaacggcagaaccgttgtcaaactgatcagaatcaccaagcaataccagatgaatgactgcatatgttttgttttagccatcgttttttctcctttagtttgtttctgtattggtcaaacgcatattcaccagtgaaaaaatgaaaatgatcatgaacaagataaatgacagcgcagaagcataccccatttctagtccaccaaatcctttattataaatatagtaaacaagggtgattgtggaatttccaggtccgccttttgtcagcatataggcttggtcaaatacttggaaagcgccgatgatcaattgtgtgctaactaagaatgttgttttggataattggggccaagtgatactcttaaatttttgccacgcatttgcgccttcaatatctgctgcttcataaagagcaggattgatcccttgtaaacccgccaagaaaatcatcatgtttccgccaaaactcatccagacactcataatgacgattgcagtcattgcccaattggaactatacagccaagctggaccattgattccaatcaaactaagcaactgattgagcaaaccatactgtggatttaagagccaataccaaatggttgctgtagccaccgatgaacataagactggcaaataaaaaaatgttcggaaaagactggtggtcttcattttgcgattcagcaacatggcggctgctagagagacgactaatcccaatggcacatacagtaaggtgtagacgatagtgttctttaatgaaataaagaaaaattcatcttgaaagatacgcgtgaaattctttaaaccgatccaattggggctttcaatgatcgtataatcggtaaaactatagaaaagtgccatcactatcgggataattgcaaaaacaactagtagaagaacaggaaccagaataaatacataggcaatgttttgctgttcattgatccctctctttttctttcctaactccatttattaacccccttattaaatataatataaaactatttaatatattaaatatctttacaagcgaattatatagaattaaaaagaatatgtcaacggtttcataaaaagtttttttgattaaactgcttgctttattaatataatatatttaatatatacataaatagttcttttattttttgagaaatggaggcgcatgcatgagtaaacctttgtaccaaacgatttatgaagatttgaaacatcaaatcgaaacaggcactgtcgcaatcaatgacacactgcctactgaaaaagaattatcaactacctatagtgttagtacgatcacggtcaaaaaagcactggatctgttaaaagaggatggctacattgtcagaaagcctcgaaaaggttctgtcgttgtcacaaataagaaggcagacattgttccgaacaaactcattttcggattgatcatcaccaactttacagacttttttggcgctcaaatactgcgaacagttctagaaacaaatactgaagaaatcaatttcatcgtcaagatcagttatggtgatcctgatcgcgaaaatgagttgatccaagaattgattgaaatgggcattcagggtttgatcctactgccgacatcatcagaatatacctcgccaaaaatcttagaattgatttctaaaaatttcccgatcgttgtaattgatcgtctgatggcaaatttgccgatctgcagtgtgcaaacggatagctttgctgctgcaaaagaattgacaaattatctctttgccaaacaccatgacaagattggcttgattacttccgatagcagtgtttcaacgattgatgaacgagtcaatggttttctctctgcgcatgtggatgccaaccgggctgtcagccaaaagcagatcttgtcgaggatcgactctgtggtccccagttcttctcgcaagatcgaagatgatgtggcacttatcgtggcctttcttcaaaagaacccagagatcacagctctttttaccacagaatacaatattgctttacttgccaagagtgcgattgaacaattgggaaggcaagtcccacatgacttttcagttgtttgctttgaccatcctaccgtcaacatttttgacttgaatgcttttattttcactcatatcgagcaagaccaaacagccatcggcaagcatgccattgatcttttactgacaaaaattgctcatcctgatacgattgaaaagatcaacctcggctatcggttgattgaaggagattccgttatttctagatgatcgtctgttcctctatcgaagcagtacattagcgatccgactacaaatagacaaaaaaacacacctccgttctgactcgctgaacgagtcagaacggaggtgtgtttattgggatagctgtcattctttaaactagacagtcctccttttagttattctcgatgactgcgacttcttttcttgtaggcatccccgtttgggcacctaatttttgaacagaaagtcctgcaccaagattcgctaaaacgaccgcttctttaaatggcaccccatcacttaatgcagccgctaagataccattgaaggtatctcctgcaccggtagtatcaacgacggtcactttctttgatgccacggtcacgattttaccggaatcaacgaaacttaccccttgactgcctcgtgtcactaccaatttggtagcgtgcgtttgctgccaagctagaatcgttgcttcgatttcaggttcagggatcaattctttaccgatcaatgcggcaaattccgtctcatttggcgttaagatatcgacataaggcagtaattcccctacgatatcatgataaggtgcgggattcagtagtgttgtcacgccattttcctttgcgagctgtaacgcataccgaagcgtatctaccggaatctcaatttgtaccagcaaaacatcgctttctatgattttatcagctatttgatctacatattcacgatctatcagtccattggcaccggagattacagtgatgcaattatcttgcggtaatttaaaaatacttgcgataccagtaaagatatttttttcttgtgcaactgactgaacatccagttgctcttcacttaagtgtcgatagactttttccccaaacgtatcttgaccaatttttcctaagaatgtcgttgttccgccaaaacgggcggctgcaactgcttggttggcccctttcccgccgacaaaataatcaatttgatctcctatgatcgtttcgccaatttttggcattcgcccagtcgtgataacaatatccatattcacactgcccaaaactgctattttacccactaaatcacctatttcttttgtatatatagaacgggccaaacgcttcgcgacccgtaacagaagttgtctctatcaaagaaaaaccggttttctcaaataagtgctgcatcggctcattcgtatggttggtcagagaataaatggcatcccctgctttacaaaagtctcttagacaagttttcacccaagccgagcccaacccattccccatttctgatgcttttgtcacgagcctttggatacattttgtatgttcattatacccatgactctcttcgtgcgccaaaaattctggactaagggttcctgcactaacgatttctcctgattcatttttatgaatcagtaattgttttttacagatatctgttttgacgatatccttatcagggtaactgcttgtccattggcagatcccctgtgtctccatatttttttttgcatcaacaaacaactgccaaatttcatccagttcttcattgcatgcatatattaacttatccatcaaatcaataaggcagtaacaacagcgacaagacaactactaggataattcctatgatcgtaggaacactggtccgtttcagcaaacgaaccggactcacaccaatcgatgacgaaacgatcatgacaactgctgcaactggtgaaatcgtccgcgctaagttagcaatcatttgcattggcagcgcaatcaagataccatcgataccggctttttgggcaatattgggaatcagctcgatcacagcatagaacatggctaatccaccaccactcaaaataccaaataacgctgtcgcgccactgaaaatcagtgtggttagaacaccggcagattgagagttttcaaccgcactcatcaaagaatcgatcacgcctagactttgaatcgctgtggtgaataaggaacccccgactactaacataacgacttggctgaaaccttgtcccattcctttgaacagttcgactgcactttcttgggcaatcttaaatgatttcttacggaacccttcaatgatcaatgctacgaagaatgagatcattgtcaaaacaaaaatgtccatcgtcacattttctctaaaaataccaataattccaacgataatgatcaagactaaaggtaataatggcaaaatggcataaaatgtcgggacaactttttcatccgccgcactttcaacttctttcatctcgacaaacgcttctgaaccttcctttttatcgcaatacgtttgccagaagtagtggacaacagctaaaataagtaaggttgggatcgagaccttcgcatgatacagcacataagtcagaatgttgtaatccaacgtttgtgcagcaatcacattgtctgctcctaatggtgttggcatgatcgttgcggtcattgcaatgacccctgctgctgtcattgatgaaattccaataccttgtaagagcggatacaaaatagccattaaaataattgctaaactagaggcacttggaacaactagagacatcaaatttcctaacaggaaaacaatcggtataaacaacgctttggatttgattttggtcattggcttgactaagatattgaccgctttttgattggcaccaatcaaattcatatagccggaatagccaaataaaatcatgatcactaatcctgctgagctaacttgtgagatgatcgtgtctttcagtttcagaaaaatatcaaagaaagccagaccagttccttctccttcaggatagagaggatttcccaatgccaccgacgcacctaataagacaatcgcaccgataatcaaaataagcgctggattataactcttaataataaaataaccaacgatacctaaaacaactaatactaaaattgcttcaatcattttttcccctcctatttacactgactgattgcatgtaaaaaccattccttgaatttattctcatcgacatcgacacagacacggcaattcttttctttgccaagtttattgttcagatcgatgatcgtagcgccagaagtatactccccttttgtttctactgcgacaaaggtttctttgatctcaaacatttccggacaaagaacgtaagctaaagcacagctgtcgtacatttttaatccggtaccaaaacttccacctcgatatttcttgaaaaggtggtacatcatatctccagtttgattcatgtctttgattttttcgctgtcttcaggataaaccagtgctttcaacccgacatctaatggtgcgcctgctagcgaaagaccgctttcaaaaacgattttggctgcttccggatcaatcgcgatattgaactctgacaaaataccaaagtttcctctgcctagcgcaccacccattaaaaccaattcttcaattctttctttgacttcaggatgcgttttaagaagaagtgcaatattagtcagtggtccgattgcgataatcgtcatcttctctgcagaagccatcaatgtgcgatgcatggcttcaacggcactctcttccaataaacaactgcgatttggtgttggaaactcgtaccctgccattcctgttacaccatgaacatcgctggcatcttttacttcacgaagcaaaggtccagctgcgccttgggccacaggaattttcaagttccaaaaagtcagcaacttcaacatattttccgtcacatatttgatccctacgtttccagcaactgtcgtgattaatttcacgtctaactgatcactgaacaagccaattcctaatgctactgcatcgtcaattcccggatccgtatcaataattactgctttgttcataagtaaacccctttcgttttttgataaaacgttttatcaattggctaaaaataaaaaacgtttgataaaacgttttatcatttgttctcccaaagaataccacttatgtaaagcgctgtcaataacgaatacaaaaaagctttccataaatttgcgctgaattctaacctagacaatcgttgtgttgatcagttaaacagctacgtcctgatataaacacaacgattacctttttcattctatctttgattccaaccgtttgccaacgcttttttttcgtacgatttttggcgtcaattgaagataacgcggcgcttgttctttcatcgctgataataaagaagcaactgctttttcccccagaactgtcacatcttgttcgacagaagtaagtggtacttctaataaatcatttaaaatcaaattatcatagccaacgatggacatttcttctgggatattgattcctaactccttggctcttttcatgatccctaaagcaatcaaatcatttcccgccacgataccggtgattgcttgattgttcaaaagctggtctgctttgtcataggcatcttcaaactgaaattttgtgaccacccgccagctttcttgctggggcagctgcgcttctttcagagcatccagatatccttggtagcgataaatacagttgatatttttatcggggttcatcataataccaatgttttgatggccattattgatcaattccatggtcgcaagatagccgccttgtcgattattataaaacacttgtccaaccggaaaattatccaaccctcgatcaaccagcaccaatggtacagaaatactgcttaaaaactctttcaactcttcttcgtaagtataagattcactcgaaagggctagtaacagtccatccacattacgatcgatcaataattgaatcaattctttctctgccgcaaagtgatcatctgaattgactaaaatcaaaaggtaaccaatttttcgcaactggtcttccagtacttttgctaattgtgcaaagaaaggattattgatgtctggtatgaccaatccgatcgtatttgttttgtttagcactaaactttttgccgcaatattaggcgaataattattttccttcgctaattgtttgatcaagcgttttttcttttccgagatgcgaatcggtttgtcatttaagacttgtgagacagcagcgattgagacgcctacttcttcagcgatatctttcaagcggatcttcactcttcttctcctcgctttcctgttttattctacgccagtccttaaggttcgtcctttctctattctatcatagctctgtttatgtaagacattcagagtcaaacgattggctattttttctgacatgagtatttggaattcgcctacgtaaagagcgcctattgcgtttttaaaatacagcacccatgaaacataacaatgaccggacgttcttttgggtttcgagaagtccggtcctgttcttttacacgtttccttagtttaatcattctttgcgtgagtgatcttggttctaactaaatattaaatcgaacccaatcggcaaaaagctcgggccaacgaaccaccgagtcttcaatggcgtgttcgccaccactggccgtttctttggttccgagacttagaccatgcccacctctaggaaaaatgtgtaattcataaggaatgtcaaacttacgcagttgttttgcaaacaagagactgttttctgccggtaccagaccatcttccaatgtgtgccataaaaatgttggtggtgtgttgcgacttacttgcttttcaagggaaagctgcgccttttgttcgtcataacggtttcctaaaagagcacggaaagacccttcatgagcaaattcaccgcttgaaagaaccggataacttagcaacaacccatttgggcgccattcgtgattggctcctgacaatgtttctgttaaaaagtcttcttgccaaaatacgcccaaacttgctgctaaatgcccaccagccgaaaagcccgcgacaatgattttctccggatcaacgtgccactgtgaatgattttggcgaatcaattgaacgctcgcagcaagctcttgcaatgctaatgggtacacatggggtttgatactatagtggagaacaaatgcctgaaacccaaaactcatcatcttgattgctatgggttcagcctcacggtctgataaaaactcatagcctccgccaggacaaataatgattaccggtcgcaaccgatcctgctccatctcttcagagttgtcaatcacataggtagtaagcgttgcttcacttttagaaaacggttggatcacttcatggatcatagtaattgcctcatttcatgataattttgctaacaactggttctttgatttgtagatgagtatactagatttttagaccagctgtagttacttgtcaagtcaaggaacgatcgatggcgaattcctcttgtttttttcaaaggggttgccgacaatttgagaataggtatcccagatcgaaagtcctttgccccttcattccaggctccttcaatcttgtacgcggcagcaatcgccccatgaaaatcccgaggaaaaagaatcccatttgctgtaagacctgttcataatccttcccagcaatcacaataaaacgattacatatgatcgtatcatattttcaatcatacataacagatttttgtttttttcataaaaaaaactgtggcataagttgaacaaataattacccgatcagaagggtcgcctcctgacgaaaatggtcgatttgcctcaaaaagccataacttgctgacttctctggtagcaattaggtagttatctgtttcggcttatgtcacagcctatttcattaaatcaagtaatcattcaaacgagatttcacgtattcaatgtggctagattccagctccacttgatcatgtgccaatgcgtaatccgttaagctttcaagatcctcctgatctgccacgatctttgcgccgatccctacgttaaatgaggcatagcgtttttccttcaattcatctaagaaacgatcttctttgatttttgctgcggctttcaatgctcgtgcataggtatccatcccagcaatatgtgccaatagcaagtcttccatttcaaaagatgaacgacggactttggagtcaaaattgataccgcctggtgcgataccgccattttccaatacttcgtataatgccagcgttgagtcaaaaacattcgttggaaattcatcggtgtcccatcctagaagcatatctccttggttagcatctaaagatcctaatgcattatagctacgagcaacagcaatttcatgttcaaacgtgtgcccagctaaagttgcatgattggcttcaagattcaacttgaagtcgccttctaagccataatgttggataaaggccatcgtcgttgcggcatcaaagtcatattgatgtttcgacggttcttttggtttaggttctaatagaaattgcggtttgtgaccaattttttctccataagcaattgccattttaaataggcgagcaatattgtcttgttcgaatttcatatctgtgttcaacaacgtttcgtacccttcacgaccaccccaaaagacgtagttttcgccgcctagttttttagagatatctaacccttttttaacttgggcagctgcataggcatagacttctgcattgttcgttgaagctgcaccgttgttaaatcgtgggtgagaaaacatattggctgtgttccataacaatttgatgcctgtttgatccatcttttctttgatcaggtctgtgatcacatctaaattttggaagaactcctctaaagtttcaccagaaggtgctacatcaacatcatggaaacagaagaattcagcgcctagcttctcgcaaatttcaaagaatgcttctactcgatttttcgcggtttccatttccgtttcaccgaaccaagtgcgctgattgaccggtgccccgaaaggatctgaaccatcttgtgtcatagtatgccagtaggcaatcgcaaaccgtaaatggtctttcattttcttgcctaggactacttcttctgcatcataatgccgaaaagcaaacatattggccgtttctggaccttcatacttgattttatcaatcgttggaaaataattcattttggttcctccatttttagttttttaacataacaaactaacttacttctaaaataagttacatgaaacctttagtagtggcgattctttcgttgattactctgactgcaatgctgccaattcgcgacaaagaggtgctgtttgttgatacactttatgataaacagaataaatccgttgatactccgttacattttctgcgattggctggattactgacccatactttacaaaagccttcacacaagccgcttcgtcaggataaagtccgcttccgattgccgctaacatcgcggcccccatgccgggaccttgctctgtggataatgttgtgatctctgcagcaaaaatatccgcctgcatctgaagccactctttgtttttcgcacccccaccaacagaaacgattttgctaaatttccgttttgcttcttcttccatgatcagttgagagtctttcagagaaaaagtgatgccttccaagaccgctcggctgaaatgccgacgtcggtgatgggtatcgatccctatgaagcttcctctgacagtgctgtccgtataaggagttcgttcaccaacaatataaggggtgaacagcagaccatctgctccgggagaaacctccccaatatctgctagcaattcggagaagtctactccttctgcgaatgtatctcgataccaacttagtgagttaccggcagctagtgtgacacccatcgagtattgtttttttgccactgcatgattgaaaacatgtaatttcccttggtaatcaatcttctgcgcttcaaaagataagaatacaccgctagtaccgatcgataccatcccaatgccttcgtcaataatcccagatcctagcgcggcacatgcgttatcggcgccgccagcaaagattttgacttctttttcaaagccaaattctgtttgtaaatcagggaccagtgtcccgacttcagctgctgattcaaaaagtgtcggtaagatttcttctggaatagcaaacttgttgaggatttctgcagaccaacagttcttctcactgtccagtagtaatgtcccagcagcatccgaataatccattgaataggtacctgatagccacaatgctaagaaatctttcggcagcatcaagtgctggaccttctgccaattgtcaggctcatgttcttgaacccaacagattttaggtaatgtgaatccttctagtgcaatgttctttgtgattgaaagaatctctggcatctcttccatgattcgctgacattgcttcgtcgtccgaacatcgttccacaaaattgctggtcgaatgaccttgttttgttcgtctagcaagactaaactgtgcatttgtcctgaaaagctgatgccgatcaattctttgcgcaactcaggcactttatcgatcaacgctttaatgactgcatgagccgcttgacgccaatgattaggatcttgctcactgaatccaggtcggggggacgacaatggatagtctgcactagcagtgtcaatcagatttcctgattgatcaaaaaccaatcctttcaaagaactcgttcctagatccagtcctagtaaataagccatattcttctcctttgctactgatgaaattcttatttgttatggtttacaaaatattgcttttaggttaatttgcttaaaaaactaactaattggatagtaaacgacctatccatttttgtcaagcgctttcaacagttatttgagacttttttaagcacctaactgaggaatatctccttttacagataaacttgcactttattaatttgcacggtaaactaacattactatagacgaagaaggagatactatgattattaacaaaatgggcatccgagagcagaatgaagctgccgtcctgaaaaccatcattgataacgaacatatttctagagctgaagtttccaacttaacgaatcttaacaaagcctctgtttcgcaaataatgaaaaaattgattgaaaccgattttgtcaaagaagtaggaattggtgattccacatcgattggcggacgcaaacctatccagcttcagttcaatcatcaaagcagcttagcgattacgtttgatattggttataattatgtcaatggcatgctatcttatatcaatggtcaacgaatagccattttggaaaaacaagatatcttgattacaaaagacaacgtattcaccacgattgattcgataatggctgaatttacccccaagatgcctcctactacccatggattggttggtatttgtttagcgatccacggtatcgttaatcaggagaacatcacttttacgccctattatgatctggaacacattgatttggtctctcctcttagtcagaaataccataccgcagtctatatcgaaaatgaagcaaatttgactgcattaggagagtattgcttttcgtctgattcaactaatctgctcagtgtaagtattcatagcggcatcggtgtcggcatcattgtaaatggacgtttacagacaggaactcacggaacagctggagaagtgggtcattctacattgttccctcatggaaacctttgtccttgtggaaatcgcgggtgtttagagcaatacgcttctaataaagttttattcgatacctacagtcactatacaaaaaaagagcttgtcaattcagatatttttgcaaaggctattcgttctggcgagaaatcagcgcttgaactagcacaacaaaatgtcgaatttttgagtatcggcttaaataatgtcattacatttttcgatcctgaagaggtttatatcaacagctctgtctatcgcaaaatccctcaattgaccaaagacctgcaacaaaaattaaccagtcagttcactcagaatacgaaaatcaaaaacagtcgtttgggcgaacaggcacctctgttcggtggtaacgttctgattgccaagaacttcttaaacattgaagatctgcgctttccaacggttgatttcctttaatccataaaaatttttttctgatacagaaaatccactgattcatttagccaccgtataacttcaataagtggcaacacaacaaatggactgggacataagtttgggtaactgactctcgctgcgctgcaggagtactctgtgctcctgcacaatttcatacgtgttctcctgtcagatactttggttatcattctttatttttccttatatcatacagtaccagcaagacaatattgaaaccccctcatcaatcccttctcccagcggcttactcttttatgtctcctgcagtgatcccgccaacgatatatttcgactgcaatcatttactcctattcaaaatcaaaaggtctcttccccttctaaaaaaggaatagacctacaaagtcagaattgcttgaattttccccattgcttttgatcattactcatcttggttctttagttttgtcttttttagtcttgcccttattggaaggcttgattttccttctgatacaaaaagaccgaatagcgttaacgtcacgcctagtagtttcactaaactgatcctttctcctaggataagaaaagaagcaaataatgtcgtcacaggaaccaaataaatatagaggccagccataacagcacctagctgttcgacggtgtaattccatagaacgaagcacaacgcggaagcccccagtccaagaaacagcagataaagcagattgtccgtttgaagcaatttatctaacgaaagggaacttttcgtcaaaaagaacagcggcataataaatagaatgccatataggaagatcattttcgtcgtgtcgatcacggaatgtccccaactagcgatctttttgaccaacagtgaatagaccatccacatcagggcggctgctatagctaaaaagtcgccaaagggatgaaacgaaagatttcctgcaaagctgatcagaaaaataccacaaaaagaaagcaaaaaaccaataaagaatgttccctttaatttcgttcgataaatgagagcagaggctaagccaatgaagagtggagaaatggaaacaatcaccgcaacattcgatgtacttgtataacttaaagctatgttctctaaaaagaaataaaaacaaacgccagatattcctgctgccatcaaataaagatgttgacgaaagtgatagtgtatcctgctaaatttggataacacactcaacgccactagtccgatgataaatcgtaaaaataatatcgccgtgggtgaaaaatcaatcagcagcagttttgtggcaataaaagttgttgaccagaagaaaaccgtgatcaaggcagtgacatggggattcttaaataaatgattcattctgtactccttaaatacattttttgatattgttttggtgtcagcccaataaagcttttgaatacattggagaaatgactttgatcggagaaattcgtcatcaacgctacttctgataaggactgctgttttgccagtaatttctttgcttcatcgattcggatcgataacagataccgataaggtgtcatgccatagttttttgtaaattgatgaatgaaagaactttttttcaaattcgtcaacgcaacgagattctctaaacgaatgtcttctgtataatttttttgtaaatgatggcaaacattttctaacaggacattttcaacgggttcattctgatacccttctgctgtataggcaagcaagttttcaataagcaaatacatcaattcctctcgatatagaggtgatttctttgaaagaatcgcttggtacaattcttcgactagttctcctgtgctattgtttcgcaggatgacttgactaaaataaggcagatcctttttgccggtaatttcttttaccacttgtgtcattgcttgcttggaaatgttgagggcgtggtaggtgatttcttggttctccagactttggcagctatgaggctgatagggattgaataaattcagatcgcctttttcgaggatttgtgtctctccgcaatacagctttcttcttcctgctaacaaaatacccactacataataatcatgaaaatggaggggaaagctcttttgatacttttctaacgcataggcctcaatgccaactatttcatcatagtgaacctttttcatactgttcctccttttctatctattttagcattgaacctttcgatttcttgtaaaatattccatgcttttctcggaatcatcctacatttaacctttccagaccctatttatgaaccaacgaaaaagcagataaaagaaagatcgcctttcctctatctgctttaattgtttgatccgctcttctagtttggatttaccagacattttataggcgcacgctcacggaaaaatcatccctcaaagccattattgtcagagacttgcttgaaccaatatcctgatttcttgatactccgtttgcggtcattttctaaatcaacagaaataaagccatatcgatttttgtaagcattggtccatgaccagttgtccatgcaggtccacatgtggtagcctaggcaatttgccccttcttgaattgcttgatgaacatatttcaaatgctctgagacaaattcaatccgatagtcatcatgaatcatcccatcttcacctaagaaacgacgttcattttcaacccccatgccattttcggagataaagcacggcaggttgccatagttatcccgcaggttgatcaggatatcgtaaatgcctttttcatagatttcccaaccacgataaggattcatttttttgcctggcatatcatacacatcaaaataattttctggcattggctctgctgcaggatcgacaggcgtttctttcgctttgatccgccgtggctgataatagttgacccccaacaaatcgacagtattatttttgatgatgtcgagatcgctcgcttgcatctcaggtaccatgtctaattctttcacgattttcaccagttcttctgggaaaattcctttgaccgcaggatcaagaaatgaacgattgaaaaaagcatccgcgatttctgctgctcgaacatcttcgggattattactgtctcttggataacttggagttagattcagtatgatgccgatttgaccagtttgcccactttcatggtaagccttgatcgccaaagcggaagccaatgcttcattaaatccgacttgaatggcatgtttcatgttactttcttctggataatgcaattgatacaaatagcccgcctcaacaggaacgatcggttcattatgagtaaaccattttttgactttatccccaaacaagtcgaaacatgtcttggcatatctggcatatgcctccacagtctctcgctggagccagccgcctttttcttgtaatgccattggcatatcaaagtgatacagattgacaaatggttcgatcccattgttgatcaattcatcaaaataatcattataaaaagaaacagctttaggattgactgcccccgttccatcaggaatcaaacggctccattgaatcgaagtccgaaaagagttatggccggtttcaaccatcaattggacatcctctttgtagttgagatagacttccgatgctttgtctggacctacttgatcaaaaaatttttccggttctttggcataccagtaatcaaaaatattctcgcctttgccgtccccggctacccgaccttctgtctgtgggccgcttgctgcggaaccccaccaaaaattttctggaaattgaaccttcatgtttctgctcccttcggtaatcctagtaattgattttccattaagaccacttgtttttcagtggccgcttttcccattttgattcgttctaagacaagttctgcggctttctcccccattttttctgctggcggattcacagttatttgcggcaacaaactctgttctgcttcagaaagataatcatagtgaccaaaggcgatatcttttccaacgatcagtctcttttgattgaaacattccaaagcccccactgacatgttgtagttactgacaaaaattgcagtcgctccccatgcgactaattcttcagttccccgataaccgctttgtcttgtgtagtcccccaccacgattttcatttctgcttcattgtttgccatagcagcttgcgcaccaaacagtcgttctctcgcagtgtgatccgactgtggggcggaaagataaccgatttttttatgtccagctgctaaataatggttgatgacgtcaaaaacactttgacggtcgttcaataagagaacatcggcgacattggcgatatctggactgttcaaagatataatcggcacatggatatgtgttaatttcctaatatctgtacattcttcgccagataagaaaacaatcactccatcgacagcgtgtcttagcaagtattctactttttcttcattctttttcgaactattcgaaaacccactgagtaataaactatatccattgtcctcagcaaccttttcgattccagatacaacttccgaaccaaatcgactggagatgctattcattaaaagtcccaatgaaaaactgcgattattttttagaccctttgcgataatattctctttataatccaaagtatcaatggcagaagcaattttttccatattcgattgtttcagttgctggccattcaaataacgtgatacagttcctaccgaaacacctgctagttgtgcgacatctcttattgacgccattttaatctactcctactattcgagatcgatttcttttgcaagatctccaatcatgatttttacttttttaacgtaatgccactggtcatctgcacccatatatcgaaaatcatcagatgataaagtaaatacaattgttttttcctcttgaggttccagctttaccttacaaaagtctttaagcatcttagtccgttggataactgaccctccaagcaatttaataaacaaaagtgtactcactttgccagcaaaatcacctctatttcttactttaacggatacttggagtttgtcaacattccttttataagcaagtgattcataagtaaatgttgaaaagcttaatccttcgccaaactcatggagtgggcttccaggtaaatcatagtagtcctcttgtttggacgcatctcgttgataataatagacaggaagttgggagctgtttcttgggtaagtgatacctaatcttccacttggattattttctccaattaaagttttagcaattgcctgtccacctgcttgcccagggaaccagccaactaggacagcatctgagcaatcctctactagagttatatcatagggtcggccctgaataagaactgttacgattggtttatccaatactgataatttccttaacaatagctcttgttttcctcccaatgaaagagaagcaacatcaacattttccccagaatccatattaattccctttgatgagacagcaccatttttcaaaaattccatatcgaaatttcgagcactagaaccacctaaaattgtgatgataatatctgcatcttgcgctatttctattgcttgtttaatttttagatcttgatcttcttcgtttctgacttcacacccttccgcatatacaatttctgcatcaatcattgtatcttttagtgcttgcacaatggttttcttttgttggtctctcgtttgaggagcggagtagtccccaagtaaatgataaatactctcagcattgggacctatgactgcgatttttttacctttaggattcaatggtaggattccattatttctcaaaaggaccaaactctctttggctacttcttcgttcattcttcttgatgcttctattaataatttttgatcagtaggttggacaaagggattttcaaataatcctaaaagaaattttactgctaatacacgactaaccgcatgatctaaagctttttcatcaatggtatcatttaagataccagattcgattttagtataagtctcatcccacaagcttagatctacccctgcatttaaagcttgtgcagctgcttctacctgatcttcatagacatcactgagtcgatctaatgcaattccatcagccataaccagtccttgaaagccgttctctttacgcaagtgttgttctaacagtgtttgatttacatgacatggcacaccatcgatatcattataggcagccatgactcccactgcatttcgtgcactttttaaaagcggcatataaatgtctgcaaattcccttttacctataggaacggttcctgaattatgtcctcctaatgcatctccctgagcaatacaatgcttcaatgctacgccaatttgatctggacttttgttgatatctgaaacacgctgatctaggaaattaatctcatctgagatcaaacttccttgaaatcctttaatcacagcttcgctcattcgagcactcaatataggatcttcaccaaaacattcttccgatcttccccatcgtggatctttagctagatcaagtgttgagactaatgctatgtgaacaccttttgccgccaattcctgagccatcaaatgactggtctcttctatcaattgcgtattgaaagtacatccgcgaccgatattcgttggataagaaatactatctaatgcttgatgaccatgaggacattcttcaacgatcaatgcaggtattccccatcgtgaatgactaatcacgtaatcttggatttgattgaccactttccaactttcctgagcgggaattccatttttgtaatcaactttcgaccaagggtctgcacgaaataatccgtaaagtgctcctagcccgcccccccactgaacatgctctttgaaggattttgttaattccatttttcctttttgatactcataacaatcccacccgtataagtgttgattcacttgtccgactttttcactcaaacttaaacgactaataagatcggaaactcgttgtcgtatcgttaaattcggatcttgatacggatattttttatccaagttgattcactccctctcgtctcgctttgttcgctgctaggacaaatggaacaaataaaaagacatctagtacgattaaaataactgtaagaatcgctgctttaatatcaccgccggtagcaataaatgattgaatcactggtggcgtaatccacggtgcggctgctactgttttttcaatgagtcctatacttgttgcaaaataagcaataattagattgaccgatggaatcaaagcacatggaatcatataaattggattcattacaacaggcaatccaaacataataggttctgtgatattgaataagcaagtcgttaaaccgaattttgcaatttgtcgttgttcttgtcttttagagacccaaagaatagcgattaccaatggcaaaatacatccacccccaccaatcagcccaaaggcgttggtaaaaggttctgtaataatattcggaatttctttccctgcagaaaacgcatccatattttcctgaatcgactgtaataagggtgcttgcctaataggtgctaggatactagaaccgtgcattccaaatacccaaaggaaatcagagaaaaactgtaagaataagatgccgggaacagataaaacaaatgctttaagtggtgtttgaatgatcagttcaatcaaacttggaaaatctaggccagccaatcgattcagagcaaatacaaaaatcgcaaaaattaaaatcacaacagtttccggaatcaacgaattaaatgaggttgctactgctggtggcaccccatcaggcatttttattttgattcgtttgattttagctaatttcataaataactctgttcccaataaagacgcaagcatcgctgtagctaaaccagatgaagaagttaaactttgcataaatacaccagttgcttcagctgtactgccatctgtcagtgtcaccatgcttttgactggcatcaaaataaataagagcgcaacacttaaaacaccggcatgtactgcactaaaggcaggatcatccatctctccagaacgaatatagtgattcgccaagttccaaccaatattataacaaacaacaactgataaaatactcatcgtcccattatttacaatgacagctaaatcagctaatggacttaaatcaataaattgctgaactgttgcatttgaaaagatcaaggcatttaataagaccataatagaggcagccatcactaaaggcatagtgatgataaaactgtcacggatggctaacaaatggcgttgactattcatttttgaaacaattggtaatagtttttcagataatttgtctacaaaactcataggtacatctccttaagtttaaaattgaaccggttcaattttaaactatagcacgtttctgtagaattgcaatcttttttttggatgcgtattcattttctctttccactaaattccgaaaaaaaaagaaaaagatgaatggtctgcaagatgtctcaagagctagtcagcaccattcatctagattaaaccaaacaatgtcccgcttatccaagtaattgattggctagtaaaaagtctttgacttcggttaaatcagtaaaacgccgaacaccttgaaagagcgcctctttgtcgatgattggttgtttgctcaatgggtatcttccttttcttgtcggtaagtctgtcaaatcatcttcgaccataaacgctgagatgcccgctttttcagcagcagctatcccggcaaacgagtcttctaagactaaggcatcttttgggagaaccttcgcctgacaacaagccgtcaaaaaaatttccggatcgggctttccttgcttgacttgatcgccagctacgatgatatcaaaggtagacggcatcttttctagctcaaaataggtggcgattttttctcgggaagaagaggaggctaatgcgatttggcaggtgtgctgcttcagctcctttagtaaatcgagcaaacctggctttttgtagactcttttttcttcggctaaaatggcttctttgtatcggttcatcgaatcccgccattggtcgacagggacatcgccgtacaactctttcattccttgacgaatctcggcttctcttttcccggtcaaataataatagacatcgtggatcaattcaaaatcgtgttcttcagcagattttagataggcacggtaggcaagtcgtcctgtttcaaacattaagccatccatgtcaaaaattactagttggattgtgttcattcgctttctcctactttattttaaaaaagagccatgcgtctagcattagatcgcaccgctcttcgttttgatactcaggtcgattcaagaattgcttttaaggatgctaaatgtgcatccccttgctcataatctctgaccagctcttctgaaaggatgaaagaacccccaactgcgattacttgcggatgagcaaggtagtcttggcaattgtccttagagattccgccagttggcaaaaatcgaacatcatagaagggaccgcttaacgctttgattgcttgtaacccgccataaatatctgctggaaaaaatttcacagttttgatcccaaacgatacggctttctgaatatcatttggtgtcgctgttcctggaaaaatcggaatctgattctttagacagtgatcgataacttctggaacaatagctggagagacaataaactgggccccctttgctaccgcttgttgggcttcttcaagtgttctcaccgtgccggctcccacgagcaacttccctgagcgtgctaagtgttcgattgcttttaacgccagttcgctgcggaaagtcacttcaatcaaacgaatatcatgtttaatcaataattcttctagtggatctagcaacgacatgtctatggcggtataaagcggtaaaactttcgtagccgctaaatgttcggtcaatgattcgacgtttgccattctattcccccgctttctgatcaatttctgcagacatttgcgatttgacaaccgcttcatgcagtccttgcaagtaactaatccccaaagctcgatcatacagaccatatcctggcattgctacttccccccagatcgttcgcccatgatctggacgaatcactccagtaaatcctacatccaccaaggctttcataatggcatacatatctagtgaaccttctgtagacaagtgtgcagactctttgaatttgcggtctcccataaagagaacgtttcggaaatgtacaaaattaattcggtcgccaacctcatggatgatcgacactagttcatttttcggatcggcgcctaacgaaccagtgcatagcgtcaatccattataaggagagtcaacaatagacaatatttttttcaagtcagacaagtttttggtgattcgcggcaagccgaagatctcccaaggcgggtcatccggatggatggccattttaacattcatttcttcgcaaacaggaataattcgtttcagaaaataagccaagttatcgaaaagaacctcttctgtcactccgtcataagtcttcatcagctgattgaatttctttaaccgttcttcttcccaaccaggcagcttgaatccttttgattggctgtggatcaatgtgtacatttcgctaggttccatcccatcaaccactgcttggtcatacagcaatgagaaactgccatcctcattttcataaaaaaaattggtttttgcccaaccaaaaatcggcttaaaactataacaaatcagatgtatgccacaagcagaaagatttttgatcgtctgaatgtaatgatcgatgtagtgatcccgttcttctgttcctgccttgatcgcgtcatggatcgccacactttcgattcctagtaatgtcagttcttctttttcgattgattgttttaattcctcaatttcggcaatttcccaaatatctcctggcagtttgtttaacaaggtgccgatgaccccattgatgccaggtatttgacggacattttgcaaaggaatcgagtctccttcgccataccatctaaagccccatttcatagtcaacatcctttcttaaaaatcatcatcgtcatcctcatcgccagcagctggcgtctcattcgagatatgccaaaaagcaacactatcttctccttgatcgatcactgcttgtgccgctgatgcaattggtgtttgcagtaattgatgattgattgcttctaacaccatcggcaagttggtaccgccaataacgtaaacttcttcttgcagatctttttctaactgattgatcgtcaaaactgactggttgtaagggctagcgctcagtaagtctactaagatcagcaccccttcttgttgattgacttgatgtaccgcggtactgattttttctcccagtgcttgaacatcatctccttgatacaaattgactgtcgctatattttcgactgctcccatgatgactgttgccgcatctttcagtccatcgcttaatgtgccatgagtagcaagtacgattcccaacattgtcattcctcctttgtctccctgcatggatttccatgcaaaacgtttactgtaacaaggcaatcgtcttgtttacattttccatattgatgtctttttgccttaataattgtttaggcagataatatccctctgttgattccttatttccgctgatcacataattgattgttgcatggattccttcttcttgaaggattccgagtcgtgctaattgtttgcgatcaaactctgttcctactacatgtagaggtgctttggcaccaacagaatccagataataaatcgtagccttgcgtttggctgagtctcgcaaaacttctaatcctcgttcgccatagcttccttcatccaagaacgcaaacgcagtgttttgtcgttcattttcactgattaaagccaataatgccaaaaccgaagaagtatttctcgttaagtttttctggaagaccgccccttttaccacttttcccaataaaagaaagtacgaaccaaatgccagaaccaagaaaaatgtttgccaagaaaaaagtacaaaaccgtcagcagcaaattgactatagaaccatgtcgctactgcgccgatcccaatcgttatgaatgagctgacaagaataaaattcattgtttgacgaccttgcgcctttcgatcaaaaaaatgataagcgccaaaatgttgcggcggtgtatcataatacgtacaaatgattcgatctgcttgagcaatatctccgatgtaaacatttctcgaagctgctttatgtttcaaatcatattcgattacgcgaatatcttttcttatttgtgagatatctgtcactaaagcatttaggaatctttttttgctgcggtcacttaagcgagaacgataaatatagcggtaacgaaacagccaatcattgaaacggtctttctgcatctttttcatctcccattcttcgaaggatccagcacgttttcaacagcctttgagctagcaaccatcaaatgaccgttgcttttttgttattgatggaactagctcagttgctgtatttggcagttataatccgaattgtttcaagacctcttttaaagaggatttaggagcagaaggtgttgcttggaaatagatgttttcgactccatagtgttcattcatttcctttaatcttgcggcatctgctttattcaagtagacggattttgtgactaacagatctttttctggatctttctgtgcgatcccgccaatgttcaactctttcattggcacaccatgggtgaccagatcataaatcacactgatggtttttgcgatcaggatgcagttgtactctttaaacgcatattcatcccaataaaattttgctttttctggtgtcacgacaatcgttttttgtcctgtgcgactgccggcatttttgtatagatctcgcatgaatttatccttagcaaccacttcatcaacgacgaagatagagttgaccccgcttttttgagacaacgtcatcatgacttgcccatgaatcaaccgttcatccacacgtgctaaatttactacacccattgttttccacttccttttctataaaatccctacgccggctagaatgatcaagatcaaagtcagccagagcagtgcttgcgtaacttttaagccttttttcgtatagaaccaataaacacccattacaacagccaatggcaagatacctggaacaatctggtcaagaatatcttgaatgataaattctcgtcctgaaatatcaaatttcagcgaagaagaaacattgacatagtttccagctaagacccccatcataaacaacccgagaacagacaacgtttcgattgctgtctgaacaccggtgctttgcatcaatccggtcgcgtttcgtcccattgcaaaagcttgtcgagcaaaaaatacacctaaaaatgcttggtataaagcgaaacaggcaaatgggaacaatgcacctagcggacttccctgctgggcccatgggacagcgatcgcaataaagatatactgtactgttccagaatcgatcgcatcaccgatccctgctaaagcacccatcaaccctgcttttgtgttgtacatcaaatcatcttgcatcagaacttctttgttttcatgttcttcttctgcccgctgctgttccatagaagacatcaggcctgtgatcacgccgcccccccagctcaattgcgtgttgaaaaagagcagttgccgcttataggcagccttgagggcgtcttcgttcttatataattttcgtaaaatcggcatcattgcgtataaaagtgacggtgccagatagcgttcaaatgaatgagggatctcgttggcaaagtgccagcgaagatatgctttcgtgacatctttttttgtgatctcctctggagcgatctgtgttgctttcactgattctgtcattttttccttcctccttgtttcttagaatccatcatcgtaatcgtcctcatcaaaggatgcattggacgtattcgtttcagcagctggagctaattttcctttttgtgattgtacaaagatcaatgcgatcagaacaccaaagattgcgtaagtaaccatagtgatttccaatgatttcagtacgacactcataaaataggcaaggaaaaagaaaaccatgtaatctttccgaccaatgacataaacagtcgttgcaatcccgatcgctgccaagccaccacctactacctccagaatatggatgacgacagtcccttcaagggcattgatgacatcagcgatcagtggtgcacccagataaagtgcgatgaaaacaagcggtacaaataaaataaatgaggccaacgttggatacaaaatgatcgaacgagtaattgcttttgtattcatgtcttccactgctttatccgtatatttccctaaaaatgtattgataaagaaccggaactgatacaaataactgcctaaaagtcccactgggacagcaactgcgatcgccgcttcgggcttcagattacctaataatgctaccggtacagcaatagccgcagcaatcgatggttcagctggcattgagccgccgggagagaagacccccatataaatcatctgtagtgcagcagtaacgatcatcgcctgcgctacatcccccatcacgatcccaacaaccaacccagtcatcaatggcgagaaacgaagggttagtgttgccccaccaccaagccatctagacatgactgccgcaacccataaagcaatcagtaaactctgtgtaatgcttaaagtttccatttttcctcctcctaaacctgctcgatatagttttctaaatctaaaagtgcttttttcagccgttctttcgttatagaaaccggaatcagatgaactttctcttttgaatcaacaaatgccactaactgatcgatcacttgcgggtcttctggatagatccccatttgatgcagggacattggcaactgcaattctcgataaaacggcaataactgatcaatgaccgtccatctttcttcaatcgctaattgataaaaaatgccgtaagcaactttttcaccatgcaaaaactgatgacttgctggtagatatttgctgattgcgtcatgcatcgcatgggctgccgcattgcgggcgtatttgtcacccaatccaccaactaaaccggcaactgcaaacacaatctctgacaagtgaatgaattcttctgttaccttttgctcttccatatcttggattgcttgttttgactgagatacaatcgctttctcgcatagtttggctgtgtagccagccaattgtagaaaaggctcatgttgaagctgtggttgcgccaaaattgtttctgattcataccactttgctaaggtatctgctagtccagcaataaagtaggaaactggcgcatcaatcactagtgtcggatctgtaatcaaaaaagctgcttgccgcaagaagtgctctgacattccttcagattcgccgttttctttatacatcacagctaacggtgtccatggtgcacaattacttgctaaggttggcacgacaccaaatggcgtattggtcagatgggctgcgtacccgaccaaatcggtcaattttccgccgccgacaccgatgataaagtcaatgtgatgtgcttctacttgatctttgatcaaatttgcaccgtagtaactgcattccccagtatactgatgataaaaaacatcctggggcgcctcgttgataaaagtcaatttgggttgcgctttttgccatgaaatcgagccatgaacgattaataatcgtttggcttgatattcttgcagcagctctggaatatgggctaatgcaccttcatggtaacgataaaactgaggaccaacttttacttttaaatcagttaacatttccttccctccttatgagaaaacaagaaaatcgctttgatcttgaacagctcgttctggtaattgcccttgaatgatctgttcgatgtccgtcacacatttttctcccatctgttcgagacactccattgtgtaagcagacgtatgaggtgtcatgattacgttatcaaatgccaggtatgggtgatccttgcgccccggttcttcttctaaaacatctgtcgctaagccagcgatcttcccggattttaaaccgtttacaattgcttgttcatctaaaagtgctccgcgagcactatttgacaaatatacttggtctttcattttttcaatttctttggttgaaatcatatgataattttcatctgtcaaattggcacacagacaaatgatgtctgaacgagtcagtaactcatctaactcaactttcttcccgccataactttgtatgtggagtgctgattgatagggatcataggctaatacctcacagcgaaacccattgcgcaaaatctccacgacacaacttcctgtgttgcctacacctatgacacctactgttttattgaacaatgctcgcccgacgaatttggctcgtgactcccattgatcttgccgaactttcacagatgactctacggtacaccgcaaaagcgccaacagattcgtcacattattttctgccaccgcatctcgttccaccaatgctgggatgatcgaaacgatcgtttgatggttacgtgcagctgctagatcgatattgttgtagccaataccatgacgagtgatcaataatagctcatctttgtgttcaaaaaattcctctgtaaagtgaggcgtcacactggcgatgatcagattataaccttgtaaacgttgcgccaattccttcccggaaatgtcactttccacatcaaaatgagtcactgtgccgattttttcgagcctctggatatgttgaggaaatattttgccaaaactactagagttgactatcgcaatcttatactcaagcatcctaagtctccttcctttattccgtttttgttacgatttcgtgtccgccaaatccatttctcagcgcagacaccacttttgctgagaagctgtcttgttcttgtgataaatttctcatgaaaagacttaatgcaattgttggaacggcaacgtccatttccagtgctgtttccaccgtccatttggcttctcctgaagcagcaacgataccccgatattcttctaagtgggggctgttggaaaattgtgcttcggcaatctccatcaaccagctgcggattaccgatccgtggttccagacatgggctactgctgctaaatcaaaagcatactcactctgctcaatcagttggaacccttcaccgattgcttgcatcatgccatattcgatcccgttgtggatcatcttcaagaaatgaccgcttcctgatacgcctgcataaagatatccgccctcaatagcaacatttttgaatacttgttcgatcgaatgaaaggcatttaagtcgccgccgaccatcagacaagcattcttgcgcgcaccggagattcctcctgaagtgccgcaatccaaataggcaacctctttgtctgaaaattgtttccctcgtcgaatcgaatctttataatttgaatttccaccttctatcacgatatcttctggtaaaacaagtggcagcaagtcttttagtaccgattctgtgatttcccctgctggcagcatcagccagatgactcgtttgccagtaaatgaagcgaccatttggctgatagtctcatatgtttctattccctcccttcgtgcagcaagtcgtgcttgttctgaaagatccagccctttcgttcgatagccatgatcttttaaattgcttgctaagttcaagcccattttgccaagaccgataataccaatctccatgatagcgcctccatttctatcttcattatacaaaaaaatatttttttgtaaatataaataataaaaaatattttttatttgcatttctttggaaatcgttgtactttaaaaatgaaggcttcggaatgtattgaaaaaggagaaaaacactatgactatatcgattcgcttaaaaatcaagaccctctataaagacttaagccccaaagaacaagcaatcgccgattacatactcgaaaaccccagtaaggttagccatagttccattagtgatttagcaaatgagctaggaatggcggattcgacattttttcaatttacaaaaaaacttggttacaacggttttaaagactttaagatggccatgttgatgcaagaaaatgatttatccgccatctctttccacgaaaatattcagcaatcagataacgagctgaccatggcgcgcaaagtctttgattccaacctcaccacattgaccgatacgcgaaaactactgcaagaagaagatttgaaacaagccgtccaaatgatcgacagtgccaagcgattgttcttttttggcgtaggcggttctgaaatcgttgcagctgatgcataccataaattcttgcgctcaccgatttctgtcgttcacagtgcggattatcacattcagttgatggaagcagcgttactgaccccagaagattgtgccctgttgatttctcatacgggtaaatcgaaagaaacgattgaacttgcgcaagtcgccaaagattgcggcgccaaagttatcgttattaccagtcacgcagcatctccgctagccaaattaggggatgtcgtatttatttctgtttccgaagagatcgaatttcgttcagaagctcttgcttccagaatctctcaactaagtatcatcgattcgctctatgtgattttgatgtttatcaaccgcaacaaatcccaagactccattgcgaaagttcgacgtacgatttctaaaatcaaagaatagccttctttaaatagcgtagcagcctaatctttaaaacctttcaatcatgtactaatgggttatgaaaaagtaatttcctctgctctcctttctttggacttcagaggattgatggctagtctaaataaaaaccaaagctaacgattaaagttctgataccgtctaagcacaagcgtgttcgatttttagtccatgataatagaaaaaagcagactgtctttcctcatagaaaaacagtctgctttctcttgttaaaaatcctcacaagtcgcgatgatcccttaagcgataaccgagaccaatctcagtgatcaagtattcgggactgatggtattggtctcgatcttttttcgtatatttgacatattgacccgcaatacttgcggatcagtgccataaggtccccaaacttctgtcgccaacgtttggtacgttacgactttgcctagatgttggaacaaaacagttaaaattcggtactcatttttggttaaatggatctctgttccggccttagtcaaaagctgcctttcagtatcaagtgttaattcaccattcttgatgactagcggcattggctcttgcttccgatgcctgaatgctgtgcggatccttgcaagcaattcattcataccaaatggcttggtcacataatcatccgcaccaagatccaacgctttgactttctcgctttcattgctgcgagctgaaatcacgatcaatggcaccgccatccgtttgcgaatgattttcaataactccatgccgtcaatatcgggtagtcctaggtcaagtaaaatcaaatcaaaggattgttcctgaaaaatcgtcagaacagccattccagtctctgctactcgaatatgatacctttctttttctaaaacgacttccataaaatcggcgatcgtcggatcgtcttcaatcagcaagacagttcttcccatgatgcccacctccagttaattcaaataaatgcgtacgaccgtttgaccatctgctacggccatctccaacttgccatgatgggcatgaacaatggttttgacgatactcaagccgatgccgagaccattttttgagtctaccggcacttcattgtctgaagacagatttgattggatccgttcaaactgcttcatcgatatttctccggtattttttatttcacataccgttttcgctccttcttgaaagacagacaagtaaacttttcccgaatctgaaccatgacgaaaggcattttctaccaaattaaaaattgcttgttccatcaaaatcggatctacctccacgaacaggaccgattccggcagctgaacgatcaactctttttccggatagacttttttggcatgttcatagactgcaccaatgatttcttcaattggttctgcggttttcttgacttgcatcgtgtccatgttgatgcgagtgatcgaaagcaaattctccaccatgcggatcagccattgagactcactttgaatgtctgtcaataacttgctgcgagtcgcttcctttaaagagttattagtttgtaagagcgtctccgcaattcctgaaatcgccgttaaaggtgtccgtagatcatgagagatggcccgcaacaaattgctgcgaactttttctcgttcattttctaattcaattttttctttttcatccttcaattctgtttgttctaaaatcacagctaactgggtcaacactaagcgcagataatttagttggctgttctcaagtggaaaattacggcttctgcgaatgcctaaaacggccaatgttttgctgttggcaataatcggtaaataaaatccctttgcaccacttaatgtatcggtcccatagccagactctttctgatttttggcagaccaataagcaacagccgcttcttccggatgactcaatgcggattgtttttttgctccatattggctttgtttttgcgcttgtgcatcatacaaaatcacttcgcgatctaacaagcgggccagataggtggctgacaaatcaaaaatctgctgccggtcttctgctagaacaaattgcttgttcagctcataaagtatttccatctgctgttctttttccattgaatgaacagcttgtttttttaaacgaaccattagattactgatcattagtgcgacaagcagcatgatgactaacgtaatcggataaccttgtttatagacggtcaaggagtacagtggttcaacgaagaaccagttgaaggctaggacgctcaggatcgaagaaagagcgctccagaaatagcctgaagttagacgcgccacaagtagaataaaaaaaatgtagacgagcatcaaattctgatcaccaaaatgcaaatactgcatcacttcagtcgtcagtgtcgctaagaaaacactgatcagggcaatcgctagatcctttccccctccttcaatgactttcttggaaagagaaaaaatggaagcacgctcctctttgtaaggaatcaaatgaatctcagtgtcaggcaaccgtttcagtagccgcacatcaagttcttccacaaacagtttctcataccatggcttggccaggtttttacccatgatgatgtcggtggctcccaccagcttggcatattcgatgattgtttcaaaataattgtcttcttcaatgacaacgacttccgcgcctaacttttcggctaatgtcgttgcttcatttttttcttccgaacgtatgtaaagcacagtccattcagcacctaggccttgcgctaatcgcgctgtccaacgaatacttttttctgccattttagggaatgcatcctggacaatcgtgatcagtttgctctggattccattggttcggccactgattcgattgatgtggtcagaagcccgctgaatcgccaatccccgcagttgttccagttttttgggaataaaaaaattctgcaacgctcgcttggcattttcgttggcatagatttttccttgtgccaaccgatcgatcagctcatccggctcgacatcgatcactttcaatgttgcttgttggaagaatgtatctgggaccgtctctttgacttcgatcccagttacttcttctacaatatcattcaagctttcaatgtgttggacattgaccgtcgtatgcacatcaataccggcatttaaaagttcttcaatgtcttgatacctcttgcgatttcttgatccttcagcgttcgtatgggccaactcatcgattaagacaatcgcaggctgctgctgaatgatcgcatcgatatctggttcagtcaacgtgatccctttgtattggatttctttcaacggaatctgcggcaaaccagccagcagactattggtatctggacgatcatggggttcgatgtagcctatcaccacatctttgccgagggcttttagttcctgtgcttctaaaagcatggcgtaagtttttcctactcctgcagcaaagccaaagtacacccgcagccggcctttttttcgattttctgctttcaatgtatctactgatgttggtctatccatgtttgcttctcccatcaacaatcacttacagtttatctaatgctaaattcagttcaagcacattgacaaatgttcgatcagaaaaccaatctttttgtgtcttttcttttattatagcacgaatggctgtttccttctgtttacgttctttggcgatgcgaggtacttgtatctcggctgcagcgacactaatatgcggatctaatccgctggctgatgcagtcaccagatcaaccggtacctctgtgatttgattttctctttgaagcgcggtctttctgtcggataccagtccctcttgttccgcagagaccggagacaattgggagaccgcattgcttctgccagcaaagtagcctggttgcaggaactgctgaccaatcagtgttgaaccaactacttctccctctaccattcgttgactaccattggcttggttggaaaatagcaattgaccgacaccagtgatcacagccgtatacaccccgccaaaaaacaaaatactaaacaccaagaaacgcaattgagtccctagaatctttttcatttctgcatccttctttcaatttgttcatagtaggaaaaagcttagcacgatatcgatcaatttgataaaaatgaaaggtgcgatcaatccgcctagtccatataccagtaaattgtggcgcaaaatttggctggctggtttttctttgtatttgactccttttagagctaatggaatcaaagcaacgataatgaccgcattgtaaatcacggctgacaagatcgccgtcagtggactacctaactgcatcacgttcaattgcgccagttcaggatagatgccataaaaaagaacagggatcacggcgaaatatttcgccacatcattggcaatgctgaatgtcgtcaatgcaccacgagtcatcaacagctgtttaccgattcgtacgacctgtagcaatttggttggactggaatccagatcgatcatgttgccagcctctttggcagcctgtgttccagtattcatagccattgccacatctgcttgagccaatgctggtgcatcgttggttccgtcgccggtcatggcaaccaagtgtcctttttcttggtattgccgaatcaattccattttgttttctggcgttgcttcagcgaggaaatcatcgactcccgcttctgctgcaatcgctgctgcggtcaacgggttgtctcctgtgatcatgatagttttgatacccattttccgcatatcggcaaaattttcctgtacaccgtttttgacgatgtccttcaaatagatgacccccatgacttggtcatttttgacaactaccaacggggtacccccagagtgcgccactttggctacgatttggtcacactgtggtgggtaggtaccgccacgagcgagcacatatttcttgatcgtatccgccgcacctttacgaatttgatcgccacgataatccatgccgctcatccgtgttttggcactaaaatcgataaatttcacttcggattgttcaaaagcgcgttctcgaatcccaaatttttctttggctagaataacaatactgcggccttctgccgtttcgtcagctaatgaggaaagctgcgcggcatctgctaattgttcttcactaataccggctacaggtagaaaggcacttgcccgacgatttcccagtgtaatggttcctgttttatccaataacaaaatatcgacatcaccagccgcttcgatggcacgaccgctcatggcaataacattttctttcgtcagacggctcattccagcaatcccgatcgaagagatcagtgcaccgatggtcgttggggctagacaaacgagcaatgcaataattacaatactagaaagcgcggttcctttttgcgaaagaatactgcttaattccgtaaatgggactaatgttactgccaccgctaaaaagatgatcgtcaatgtgatcagaaaaatctgcagcccaatttcattaggcgtttttttgcgttgtgtcccttctaccattgaaatcattttatccaaaaacgaatgtccattttcagacgtcactcgaatgaccaagtaatcggaaaccactgttgtcccgccagtgactgcactgcggtctccacctgattctcgaattactggcgctgattcacccgtaatggcactttcatctaccgaggcagcaccttcaatgacatcgccgtctgccggaatctgttgtccagaaacgacataaaccaagtcaccttttttcaaatctgatgacttcatttcgatgaactgctctaattggatatcctgtaaatcattgattttgtaagtcatgacatcttttttggcttgttttaagctatctgcctgagctttcccacgaccttccgcgaccgcttcagcaaaatttgcgaacagtaatgtgagccaaagtaagctggtgatcgtgatggtaaaccacaatggaatgtcagattgttcaaagcagagaaccgtcgctgcgatggcaccaatataaaccacgaacatcactggattttttatttgttgccgcggatctagtttgagaaatgcttgcttgattgcccagcgatatatctttttcattttattcttctcctttttatttcagtgtaagaaaatctgcgatcggacctaatgccaatgcaggtagaaaacttaatgccccgatcactaaaatcacaatcatcaacatcgtgacgaatgtcggattgacggtagaaagagtaccgtcattcacagctactttcttcttgcgtcccatgttttcagccaaaaataaaacggcgatgatcggaatataccgagagaaaagcatgagtccactacctaagacattcaaaaatggggtatctgctaacaacccattaaatgcacttccgttgttattagccaatgatgttgctccgtataacagctcactaaatccgtgagcccctttgttggtcaaccattccaaaatatccgggtgcatcgcaagcgccatcgccccaaacagcgtcagcagaagcggcgtcaaaatgactaaacttgccattttgatatcaaaggcttcgattttcttgcctaaatattctggtgtgcgtccaacaagcagtccggcaatgaacactgctaaaagcagaaatgctaacatcccataaagcccgctaccgacaccaccaaaaatgatttcccctagttgcatgagaaacatcggcactgcaccgcctaatggagtgaagctatccaacatcgcgttgaccgatccattggaagctgccgtggtactgactgcccacaaacttgaccagccaatcccaaagcgaatttctttgccttccatattggctgaaccaacgacatcgttgaaaatcggtccatagttttcactgatcaatacacctaaaaaagcggcaaataggaagaacagcgaaacaaataaaatcgttcgtccttgtttccagtcttttacccaaaagccaaaagcaaaaatcagcgcagctggtaaaaggagaatggctaaattctcgataaagtttgaaaaaatcgtcggattctcaaatggataggccgaattggccccaaaaaagccgccaccgttcgtccctaactgtttgatagccacctgactagcaacagggccaagatataaccaaagattttctccttccaaactgttgtaggccattccgctactgaaggtttgaacgactccttgagagatcaataaaatcgcaatgatcgtggacagtggtaataggatatacaataatccgcgaaccatgtcttgccaaaaattgcctaaataggattcttttttctgaaccaatccacgaatgaatgcacaaagaacagccaatccaactgccgccgacaagaaattttggacagtcaaaccaaagacttgtgtactattggatagtgccaactcgccagaatatgcttgccagttcgtattagtgataaagctgacagctgtattaagtgctaaatcaaaagacagattatcaacctttgctccacccggcagccaaccttgaaccattaaaagtaccgtcaaaaacagcagcgaactgattcctagccctaatacactgatcaaataacgttttgcggacatttttcgctgactttctgaaccgatcaaccgatagaaaccgcgctcgatcggttggataaagcggacgaaacggggcgtctcccccgtcatgatcatcttgatataaaaccctaaaggggctgctaaaatcagtaatacaaaaaagaaaaacagcccttgaaaaacaaagctcatcataactcttcccccttgaacagaaaccaaaatagataaagcatcaatccaaaactcaaacatcctaaaagtagtaacatcttcttcctctcctttgatcttatcttaaaaaaaatgttgtaaagatagtatcaaggttcgctggatttctttatatcttctttatacgatgagctgtaacacaatctgtctgtttacagcgaattagcggatttatcttcttgcccaccctgttatatttggttatacttgtctcacttaatctagagaggagcaatcaataatgcagtttacgatctcgggtctggtcttaatcccgttatttcttgttacttgctatttgattctgcgttacaatgctgctcagctttcactttttcaaaaaataacggttggagctttgttttctatagtttcgctgtcctttacttgacttttttcccttttcaaatccaaacaggggtctatgccaatcaatccgattggcttagtcgcatcaacttctccttagcagcagatctttcgatactccctaatctcattatgttggcgccattagctgttttttattatttgatggctaacaaaacttctatttttcgagctgttctgctgggattttcggtcagctttagtatcgaagtactgcagtttttaagcaattatttcctaggcggctggcgaggggcagatgtcgtggatttgattgcaaataccgttggggcattacttggttatttactcagtcgctttcttttcactgtgctgcctgagcgatcctttcttagaaaatttatgcttcattcccctagtgagtcgtaaatcaactatcggagcaagcaaaaaagagcccgtcaaaaggctctttttcgtatctgtctattcgaaaagaaaatcttgcagttttactagatgggtattgctgttgccggaaatcaagcagatcactttgtttagcgatttgttgaaacgatcgtggcaccaaaaggcatcaatgctagacccgctagtttcagcgactgtttcgcaaaaggaatcccaataatcgtaatcgttaagagaatggcactcatcagatgagcgattgccaaaggtattcctgaaaaaatcagccacaggatattcaatagcaaagaaacccctgaaccactatagacaacttcttttccaaaaggagccaatgataaagaagcgaatttaaaacactgcaaaccaatcgggataccgatgatcgtcacacaccacagacaaccggccaaaaaccacgaaattgcaccaagcaatccaccaaaaatcatccaaatcaggtttcctaaacaactcatactcatcacattcctttcctttgaaaaaagcggccatcatagatgacgaccgccttgcattatccttcgttcgtttttgattacattcatttagccaactgcttattcgttagaatttccgccaaatacacccgtgatcgaagaccaaagtccactgaagaagtttttaacattttcccatagtcctttggatttttcttcaatttgtttgcgggcttctgaaagatccaactctttgacaaaatcttcaaaaatatttttgtctttcatgtcgctcatcaatgttgtcaattcagtaacttgatccgaagtcacgattccctctaaaccattgtctttcaatgctttttcaacagttgcttgaatatcggattgggtcaattctgagccatcagctgtttgggcagctagctctgttttcgcttgttcttgtgcagcattcagagcttcatcagaatagccttctttgtctttgttttcttctgtaatggttgataagacatccatttcatcttgcgcaacactgacacgatcttgattgatgatgccgccggattcttcaacgattttgtagactcctgccaatgccccagaaccgtcaatcggtacagcagaagctactgttagcttagcatctgtgatcccagcagtcagtgcggcattttggtattgtgcggcagtgatgcgggtgatatttttaggtgtcgcaatatccaccgtgattccttcgccactatcaagggtctgcatgcggacagaactatacaccgcccaatctttagtaaagccaccatcagggatatatttcattaaatcggaacctgaagtcgtatagatcggtgtttctcctttgatccccagttgatccagggtatagttttcttgctcttttgttaatgcattaccaatggctaccgcattgatctgcaatttttctttactatccgtcgtagaagtcgcagtttctgagcttgctgtctctgaagctgccgaagacgaggtttcgatcgtttgtgagattgctgagcgcccttcacttgaagttgattcttcagcaaatgctaatggtgcggcaactaaaacttggctagaaaccaagagagtggctaaaatcatttgtttttttctgatattttttttcatagtatcctccatctaactattttcctgtttctattattgtactataagagatacgtttcgacctacggctagggtcggatttgaaggaaaatttatgatctacttgtttaatgaatcgaaaggaatgtttttttatcagaaaaaatagccggttgaaagggaatcgtactatccattgaacaatacagcagggtctaaattctagtctacgttataaaaattattttcttgttcacttcaacttttttctttaattcatatttacattcaatattcagaaaatactggcattataggtaaaaagaactagatagattattattcgaactaaaccttacaaagtggcaaaatttattttactacagataagcaactgaaaagagaataaatctagaaccttaatattcaaaaagactttgacataggtctgatactactttatttcatattaatcgtaaatcgtaccgtcttatttatccgtatatatctttttttgtaaattcactctgctcttacttaaatagattgtaaattaatccaaaacgaatacgagagtggagcaataatcagattttcttttgactattgctccactctggtattttttattactaattaatatttctctgaaatatgttactcaaaaaactagtaatctaaggccttataatatcgacggatatctaaaggatgcttgcgaacattttctaaatgcacacttagtctcataaatgctgatctcattacaattggcgatagtatccatctaaacttgtcacttattcctacaagttcaaagtcttttgtgtcaaaaactgtcactttattacttactcgatgaacaaaattttctacacgatccatttgaccacgtgttttatcttctcctttaagtaaaacaacagggatttctctatctattacttccaatgtgccgtggaaaaaatctgccgcagagattggtcttgttggcatccattgcatttcttccattatgcacataccatagcatactgcccaagactctaaatttcctgagccaattagataagtgagtggttcgttccaatacttttctgcgtaattttccattgatttatctgcttttttatacacattgacaatattggaaggcatagattttaattcatccataaacttctcatactcttcaaattgtccagctttgttcataaatcttaatagtacactataccaccagtagtattcagctccaaaagtattcgctaaataatctactttttctgctaaaggtgtatttaactgctctacatatcctatgactctagctccaacttcatgagcgatatcaattgctttttccacttccactgtatgccctgacaatgaagctattacaacaaccgaatctttcgtaaaattagcatttccttcataaacaaagtcttgtgcgttttccagatatattggcagctggcatcccaattgttttactgtatgaactacttgatctgcatacaaataagttccaccaattcctagcaggaaaatattcttatatccattatcaacgatttcatcaacaatcttttcaactttctttacaagatcaaccccattttgatgttcttggtaaattctttcttcattaaaatttaacattgtcttactctccttagtttaaaattccaaattgggcacaaatgatcccaaaaatagctgttcctataatcatccataaaacgtttacttttttcttcaacaaataatagtaaaatccagtaattcctaaacttagcattcctggtaaaattccatcaagaatttcttgaaatctagtggccgactcaccctctccaatagtcaatggggtttgcacaacaactaattcatttgtcatacctccaatcaccataactcctaaaattgctgctgcgagcatgaacttactcattaagccagttttctgaattttttctaaataattagctccgagttcataacctttgaatgagcagaaatagcgcaaaataaaagctggtacattaaatatgattaaaaacaaaattgggcctaggatatttccttgagcagctaaagaagctccaatgccgactgctagtatacgaagggttcctaacataatcgaatctccaataccacttagaggtcccattagagctgctttaacagcattaatcgatgatgtatcaaaatcaggatttgtagcattcatttcttccatagctaatgttactccgcctacaaaaggtgagatatgcgaggtgatattgaaaaactctagatgcctttttaatgcttgagctaaaccatctttatcatccttgtagatttttcttaaacctgaactgatcatggaacaaaaacccatatgcatttgtcgctcataatgccaagaaaattccattgataaagaacgccaaaacatttttctaaggtcttttttagtaattactctatttgtttcattagaagtcatcatcaatatcctcacttccttcagcaaaagctacatctgaatttttgcttgttgtaaaattgattttcacaaaaattgtaattaaccctataatagctatacccactactggaatctggaaataagcggataacacaaatcctagaaaaaagaacggaactacttctttattcataaccattctagctaacatagcaaaaccaatagctggaagtataccggtggcaatagatagaccatctgtaattactgaaggtatagcattcactacagcccccatttttgaactacctaaagaaaaacctaaaaaggtaataataaacaaaactgtacaagtaataaatccagtaatcatatgaatcgcagtcacttttgaagcctcacctttttctgcatagttatctgcaactttggccataaaaggacgaactaaagtaaaaataaagttatcaactacttgtgccaatagtgctattggaaatgccatagtaaaagcaatatctgcacctttaccaactgttatcgcaaaagctgtacctaatacaccacctacaattacattcggcggaatataagcacctacagagacctgccccaaaaatgctaactcaagtgtagctccaattgttattcctagttgtaaatctcctaaaactagcccaactaatggtcctaatacaatggggcgttgaatcatgtttgtccctgttgctaaatcacacttccctataaaagcaatacaccccaataaaaaagcttgtagcataagtttattctcctttctaatttatatttttcaaaattgatactgcccttatcgctttttcgcctggaaccatccgaatctctacattcactcctaatttgtctaattcttttattatttctatttctgccattgttatatttacagacttagaaatattttgtgttccatttgttgccttggttccacctagattaatttcttttatatttggacaatttttggctaagttaaatgcgtctttaattgattccacaacaataaagagcttatatttatctgttacaccactgttgatagcgttaatagaatcctcaatattcttaataactaattttactccttgaggtttcgctaactttatggtggtttttctgaggtcatttgtcggcacatcatcattggcgatcaagatacaatctgcccctaagctttgcgtccaagaaaatgcaacttgtccatgtaagagtcggtgatcgactcgtgtcaaaataatcatgtcgttcctcctaaaattcttcttcttcgatttcttttgctacactctcattgcagaactggatcatatctttcgaattagccaacgtttggtggatcgtttctgagatggcacctcctccttgaagttgtgttgtcaattcaatcaacaatggcaaattcaatcctgcgatcaagtagaaattcggttgttggatataacgtaaaaattcattgttcacactgccaccgaaaatatctgtgataacgatcatttcgtgctgtttataggtttccatcagtgtatctatagttgctgttagatcgaatgcttcttgaacataacaatcaatggcaatgactgattgtttttttccacaaataagttctaaagaatgcaagattcctgatgcaaatttaccgtgtgatgctaaaataatgatttgctccactgctttcacctctctttgcgccaagttacactttattaaacgcaaaaagcgtgccaaaaaaagtggcacgctttccttatcgattaaaaatccgcttcaaccattgaagaatcagtgtttccaaataaaacatcatagatatagcaaacttcagattctggtatcgcgacactgtaaaccttttcaatgacactaaacgcctttttgatctctttcagctgtttttcatgacactgaagcagtgtgtcgctggcatgataattctcaatggcttcatttcgaatcagtcgttcgatcaaacaacttgtatggacaaacaacgcaagcttgcggtcattagtgattctttgctgccatatacgttccagattccccacaaagaattccatttgagaaatcactttctctgtatctagaatcgtcacagattgaatcactcgatccagcgaaaagtttcttactaattgattgttcacatacgcaatcatctcttcatccaattcttctttcagccaacttaatagcactgctgtacctgcgccagaaatcagttcttctaaagaaataaaaggagccagctcttgacgaggtttgttggttcctacaacaccaacaatgtcatacgatgtcaaagcctgtttgacatgttccctattttccaactgattgaactcataagggagaattcgaatctgtaaatgatctggaatgctcttttctaataaatttgagatttgaaccgcagttccaatccctgttgaacacgttgtgatgacaactttctcttttttcgtttgcggaagaataatctcccattcattttgactgtaggcatttacccgttctggaatttccctcagcgaaacattttgctggatacattcccccacagcgatggctacacttgtcgttacattgttcatcatgacgattggaaccgtcaattctggaatatactgatagatttctttcaacgaacccatgtcgaacaagaccactagtccattagatacatcatttttttgaatatatgcggtgaccctttctgcaatttgcttgggcgtgacatctaatggcatatcgaaagactgaaaaaccgattcattcaacaaacgattcgctacattcgcaatgctgctggcagttgcgtagccatgagccacgatgatacttctcggaagcaatgaatctttggtataccccatatcgttgatatagagtgtaaagataatgcgatccatactggttaactcgatatccaatgctttttgtactagccctaacagattttcggtgtagcgatcacttgtcgaataatgctttttaacgctcttcagtaggttctctgtcaataaaagtttgtcttgatcatccggcagccactccacatttcgccgcagccataaataataactgatcgtataaaccatgctgccgttaaagctgatttggaaggaatgttcaatctgttccatcattcgctggacatgctcggtcacaaaaatcatcgtccgctgcttttgttcttgcttatgatcaaacaataaattttcgaatagtctttcaatcactttagaaataggatcagctgcagctgtaaaatcctgtcctgcctggacataattgagcaggatctgttcatatgtttgaatgatcttttgttgttctggctcactttcggcagtcagctgctggatttgcgtttgcccatcgataagaatcgattgcgtcgtcgctgactcattgggttcatctgtcaattgcagtaaatgttctggtaaatgatagaccgtgactgctatttttttggctttccgctttagactagcagtatagcttttggcagtaataatcttgatcgtacttttcaattcaccgacattcccagaaaaatgactcgtcgttaacatttcgatcacttgaggtgagagttctaacggcaaaccgatgcgcttttgctcttcaaaaaatgcttgcaagatcagttgcttccgttcagaaatcgttcgttcttccaaagcaggcaatgtcgcttggatcgggattcgccgcaaaaaagttgttagaaaagtttgtttcaaatcttctgtcgttgcaaacaccaaccgacaatccaccgtgactggtcgtcttgtatcccccattcgatagatgacaccttgatccagaaaagtgaataatttttcctgtccttcagcattcaaccgatgaacttcatcgagaaacaagacaccgccatctgctgcttcaaaagcaccagcacgatcttcctctgcgccggtaaaagcccctttgacatgtccaaataaattactagtcaatagctcttggttgttggcgtactgtgcgcaattgatggtgatcaaaggcgcatcgacctccaataattcattggccacacaatagtgatggaacatttttaccagaaaactcttccccgtcccactttcccccgtcagtaagaagggaagcccaccatttggatagaaggcggccatcttgatctgttcaatgacttctgccagactgcctttgctgccgatcacactggaaaagaaatcttctttttgatcaaaaaaaggtttttccgccgcaacagcagccagactctcgtatacgttttgtgttaaggggtagttttggctctcaaatgcctgcttatgaaaaaaataaacgggtcgggtcgcaattttcactaaacgactttcttccgttagctgattcaaatagtgactgatcgtgtttctcttgactgaaaacttctcggcaatatctttcgctgtaaagatatcgcttacattttctgcagagaaaaaagccgtctggttttgcaagtaagcaagtaattgttctttcatcgctgttctccttgtcctctttctccgtttatcatagcttacgattcttaaaaaaccaagaggtgacagaggaagttgcttggaatgaataatttcgaggatatttccctcaactataggtcatcttgaaaagagtccttagcataaaatttatgatccaataaaaatcactcaaggcagtcacattttttttagaccgttcacagatcttgcccttccgctagagactcttttcattttcatagatacctctatttcttgcaatctaaagtaaatcatcaaagctgacggttccgcaacaagtcctccctttttattcctttacaatactctctacttattgcattctattcctttcttaaatcgttacttccgtatgatcccggctcaaggtatataggctggtttcgactttgaagtagtcttcgactaattttttcaactcagccattgcggcatcagcccgtaaatgttgttcttcattgattgattcaatgaacaatactgcgttgacggtctcttcttttaacatcgtgcgttgcgcttctcgccaatttaaacagcggcagatggctccttgctcgtcatagtaaatcaattctcctgctagagctggcgcatccgcctcggcgcctaatgggaaaaatgactccccacccttggctagtccaaggtgtaaatcacctgcgattgcagccaaatcttctccacctaaaggcatcccatacttcatagagacactattgtagagatctactaatggattgattggaaaaaaagttcgatcttgattgacacgcttcaacaatgcttctatggaagaacgggcacctttttttgttttaaatttttggaaagcttcccgccattcttggacaactggattttcactgaaggttgcattcgttaagaatcgcttagcttcgcgcttaccgttttccagcaattccgtaaaataactttcttttgcaggatctattgaattgtcgatccctttcacaacgagacaactaatttgtgcttggggaaagatttcccagaatgcttgatcaattactattttcttcattgctttcacactccaaatgtattaataaaaaagcggcaaaacaatatttgctagttccgccaattgattccaaaagttgatcattatttaaacctgtccttttaaactagggaaggttgatcacatttttgaaaaagaaaacgattttctatcctacagtgccgatttctcttgccctatctaattagtagtctctttttccaccattctttacaatcgcccaatccgattcaatagattctctgatctttgaaagtaaatttgacaccgtttctatttctgatgcggatagttgagtggtagcgattttgttcgagtattcgttttctcttaagataaactgcacaacatgctttcctttttcagttgtgtataaatgtttgatttttttattgaacggatcggattcttttaaaatgaatccattctcttccaactttcggacagctcttgacagcgttgtccgatcgactttaatcacctctgctaatcgttcagggataatcccctcattctcaaaaatacgaaccaaataaatatactgccctttgttcagctttaactctttaaattcaatattggcaatggcatcaagcattcggctaatcgagccaatttctcgtaaaatgtcattcattcttctttctcctcttctatcattatcctacctttttattgttgcaaatgcaatattttttcggaatagaaaagagcgaaaccaatgtttcactcttttaaaaaatatttttatcacttatacattctgttgctagttgatcatatttcgccaaccacatgactaacaacaaagattgtttcatttgctcattgcttggaggaagagagctaaaccattgatcattcactagaacccgtcagaggtatcttctatctaaagactagctgattttttccctcagttcgttttgtctgtttttctgacacgtattctcttttattcaaaaaagaactctttagaattgtttctttttcataatcgaaatactgatcctcacagagagtgccaaaagtagcatagcaattactaatgcaataagaaagagcattcccatgctgacaatgggcaatgtgttcaattgagcaatcagatcaacattaaagaagagctttgccccttttacaattacaacaccagcgactaccagaagtccaacagcaccaataatggcaattctgcccttttcgccgccaaactttagttggaagggaaacataatagattggatgatgatcatgatcggcaggatcattgctgcaatctgccagatctcagtgagagaagtagtatctctaacaactgttgcaatcaatcctaagaaagttgccaaaagccatgaactaaatcccagtaggaatcctagacaatatttttccagcacatagcccactcgagtaataggtaaagtgaataaaaacgcatacccattgtcaaattcatcatagctgatagtgcttaatgtgaataaagaaagcgcaaaggttaagaaacctagtgggaatgatacatcctctgtaaacgagatcattcctattacaatcaaaagaataaccaaaaagaaatttttttgtgtggccatcaatttaaaatcttttaccaacaaacctgtcattattcacgcccccttaccatcatcataatcacttcatcaattgatcctttttcaatgactattttaggaaaattctccatataaaattgtttttgattcgttaaacaactatacccatagctttcttctttgtatcggagaataaattgtttatccagttctttgtattgctccggatcaactttcaatagtgcataatcacttaacaagacatcggtctcttcgtgtaagatcattcgtccatcatggatcatataaagatcatcacaaagtgtttctaaatcactagagatatgggaactgatcaaaatcgcacactcttcatctttttccatgaactctctcaacatcaaaagtaattcatctctggcaatcacatccaagccagctgtcggctcatctaaaagcaacaatttagcgtgatgcgatatagctactaatacttttagttttgctttcatccctgttgaaaaatcgttgagtcttttatccactggtagttggaatcgctgaatttgttcggtaaaaaagtcttcgtcaaattcgctatacattgtccgtaaaatcggaacaatatctttaatccttaaatagccgctgaagccagaatcggataaaacaacacctaacttttccttctcttttggggtgagttctttactatccttgcctaaaagtgtgatcttcccactgtcaaaaggaattaaaccaagagctgctttaaacgtggtacttttacctgctccattttgaccaatcaaccctgcgatagtacctttttgaacttctaatgaacaatcaagagaaaaattatcatactgcttttttagatgctcaattttcaacatgtttcaaccctccaatatcaattcaaacaaactttttatctcttcatcactaatcccgcaacgtcgcccttttagaattgcttgttccaagtcttgttccagctcctttttttgctcttccaataaaagctctgtattggtagcagctacataagttcctttcccgtgaaccgttactgtaaaaccttcagattctaacgtatcataggcttttttgaccgttaaagcactgatctttaattcttttgacagtgtgcggacagatggcaacggatcattctcattcagctccccatttcgaatatgccctttgatttgatcgacaatctgctcataaatcggcaccattaaggaagtattaataatcaatctcacattttcttcccccttctcgttgcaaacagtatataacagtacacaactgttatcaagtgttatatactgtttattaaaaaatttttgagtttttactgaacataaacaaaaaaagctaggcaaaagcctagctgagaacacgatttaatcgtgaaagatagatagttatttcatgcgtatgataattgtcccacctataacactcacaatcattatgccgaggacaagcatccaactcgccttctcatcatttgtctgtggaagttttttatcattcgttttatttgaagcgtttaaggcagcagagtgacttgattctgattgattgttctgagtccctaatatggacgaatcagttgtgtttggttctgtcgtacttggttctgtcgtacttggttctgtcgtacttggctccgttacgcttgctctgtgacacttggctctgtcgtacttgatgtttcttttttagtattggtaataatgatggtaccatcctcattggttaccgcactttcaaagtcatctggaacattgacttcttcgacagtgtaaaagaaatcttccccttggttattgtactttggtaatactacattttggccttcaactgggacttttgtgcgtgttccttgatagccctcgcctttattcgaggttaaactatctgacatttgccaactttcagcactaacggtggttgttcttttgacttggtattcgatctgatcaggaatctcagcatctggaacattgacccacttcttcataattttcaattctacgacaggtgccttgatggatggaataggaaaatcgaaatattcaccatcacttcctgttgttaatgtcgtacgtccattacacaagacccatgtttctccttgaaactcagcggattctgtatttattcgaacctgataagttagggtaagtttttcattttcacctaacgcgatgttgctgatagagatggtttgattagcttcagttacttgaactgctgcaacaatttcaggagcttggatccatgctccttgatcatttttgcgccacccgaccaattgataatggctattatcaaacgtaccggctccttgtaaaaggattccttcccccatagggtctgtgatcgttccattgggaatcgttttatcaatgtggttcgcaatttctttcaatgctgaaccaagaccgctaaggttttcgtccgtcgtcaaataattagccggtgcagtagcaagattacgggcaatgtattcaccccttgccgaaggtgccgttgccactgaataaaccgtaaagttcgattccttgatgtcaacgatcgttcctaatgtttcatcagtcaccacttgactgctgactggaactgctaaactatctgttgaagtcttacttgttgtatggtattgaggattagctgtttggaaagctttggtatagctgctagtatgataaccattataatcattgatctttcctgtattgggatacacagttgcattttcagcaggtaaatagctgcgattggcactatcatcgccaatatggataaacttcttttcagcttcaggtcgactttgttcaagaagcagacgttgtccctccatcaagcctttttgcataaatgttcctgagtgtgattccgccgtatgctgtaaaaaattttgcagataatcgatattggttaccttggacgtatcaaaattttctatggccaattctttaagtgaactcgtgccattaaacatggctgtcatgtcaattaccgaggatgtatcccattgattcaagtcaagactttccaaggagcttgcattcccaaacatccagttcatatgagtaactgaagacgtatcaaatttattcgcaccttcgattgcccttaaatttgatgcccccataaataattgtcctgaatttgctggtaggacaaccgtttctttaacaacaataaattcagtagccattgatggaagtttccaaggtgctgcatccacaagcccagcaacccctccataaagcgtaattgtttttgaaacttcatcatagtcccatggaacagttccccagagagaaagctgacgctgataaacgaacacaactgtctgtcccgtatccgagaacgttcctgatacattatcgggtaccgtaattaattcccagccttcgattgttttagcttctgcggtataagtgtctccgtaataaccagtcaatgtcgcactctccgcaacgtcatttccagattcatcaacatatttcacaagaacttctccggctggaattcgcttataagtaaaaacgacggtctggtcaactccagtaaacgtaccagccgcattttgaggagttgtcattagttcccagcccgatatattcttggcttctgcggtataagattctccttgatagccattcagaagcacggtattcgcaatctcatttccagattcatcgacatgcctaactgtcactattcctccaggaatccgttcatatattgcttgaatgactgcttcaccagctccttgtaccgtgatcaaggaagattctgcataaacatcattgacagaaaccccaatgctgctactaatctcccacttgacaaaccgccaattaacattgggtcttgccattatacctgggatcgatcccgtaggtgttggactcacaaattgttgaggatttcctccttctggcggattagcaattaactggactaagggattatttcgctctagaggatgattcattacttgttctgattcttgcctatttgattcgacggtattattggattgagagatctcctctgcataaaccatatctatgggaatatgcgataaaagaatggagaagacaactagaaatttaatcagttgatccattttttttactttttccatcattccctccttttgtataaactagcgaatttaaccatgcgtttcctactctacataagcaataactgcgtttttaaactcgtttaacattcgaccgtttgttattgtctattttttagacacattcctccttccaccttttaaaatcaaaaatcttcgtttttaataagcaaataaaaaaacagacaaatgactttgtataaagacaaaaatcctttgtctctagacagcgcagatgaagtgtgtcccccataagtaagcgtctcaaaaacgaaggcttttgagacaaaagattgagaaatttaaatttctcgagattaatcataacaactcaaaaaaaataaaacccaccaatattttctttacctagtgaaaaaattgacgtgatgttccccttcttcagcagaaaacattttcttcctcaggggattacataacaaacgaaccgatatatttaaaaacagcaatgtgacagggattgtttttttagaatgttttatttccgtaaatagcaaaaaaaacttaacgaccgccatttttttcttgtccttactcaacgccctgctctcttctagacaaacaaattcagcaattattgttttggtttatctgctatcttcaaagaaaaaaactgagtggggaaaaataggatgtttgaaaacgaattttcatttagtcagacaaaataattcgttattttacgttatatacttcatgtacaaaaaaaggtattctttcactaagaaaaattttcaactggaggaatatagatgtcaggaatggtttatggttatgcgcgagtctctacaagacagcaagatctttcacgtcaattggatttacttgagaaatataactgccataatatttatacagaaaagattagtggtacgcaggccaatcggccagagttgatcaaattaaaaaagcgcgtgaagcaacaggatcaaatcatcatcgaaagcttttcccgtcttggccgcagtaccaaagacttaattgatttggtatatttttttgaacaaaaaggtgtgaaagtaatcagtgtcaaagaaaattttgatactcagacaccgcacgggaaattgatgatgaccgttttccaagcatttagtcagtttgaacgtgatattattgtcgaacgtaccaaagaagggctgatttctgcacgggcaagaggaaacattggtggtagacccaaggtagatcctcagttaatccaaaaagctctccttttgtatcaagagtagggctattcagtagcagaagtttgtcaaaagaccggtgtcaagaaagcaacgttttatcgttatttaaaacaatcagcattgcaaggctgatcacttggctttccttcgctaacccagcaaaccacatcaaaaaacgaccattgttttacgatgaaagcaagctcatcacgagtaatccaatggtcttttttctaattttaacacagcaaattttctagtgtttaatcaaatattctctggttcttcttgtttctgatgatattttttttcgaaatcagtccatgatcggctaaattgatgattcgaaaaggcactctttaagccggagctttgtttgaaacgaaagacttcttctgcctccattcccaattctttggcaatccgatcatctgtccatccgcttgctactaattgttgaacgattttgctcatcttctcgataccatgagtgcctcgagctcgattatgtctaacagtggaagccatacggtgttccaatggcttatcgataacagtcactggcacttcttttaggttcaaccgttctttggccacttgatagcggtgaaagccgtcaatcagtaagtacccttctttttcgttgtcaaaataacagactaatggttgtgtgaatccgtcttcccgaatcgacaactccaaaagttccaactcgggttccgctactttattgggattgtagtgattggcgtgaatttgaatcaatggaaccatttttacagctagcacaggaaaagcaattttttccattaaacagaacactcccttttgagaaaataatagttcttcgtttggcgaaaaacggtgaacccttttgtctggaacaacgccacttcgttagggtgactcgttgtgactgtgatttcttgatccggatgtttttttcggatgtcatgcagcatttttcttaacaaaagagtttttctgcctgaagcaggctctttttcatagaattcgccaatctcgatgcgagctgtttttttttcatagtaagagaagcccatcacctgattcagcgaatccacgatcacataccaatggcaatccccagaattaacgagatagggaaattgcttttggtagattcgctcagcaaagaaaggccccatcaattgatagaaatgtcctttcttatatggtggaaaaaagacgatcagttgttctttcaactactccacatcctttcagcaaataactgattacggctgattcttggtcaattgttcataggtctttcctaacttcttcaattggtattttggcaggtgttcgatgcctaatgccgcaccaaattccacggctaacgcatagagttcagactcgtctttcttggtcaatgcgtattgtctggtactcaaagaaaaatcatttttttccaatgctttcgcgatccccttccagtcatgccaaagtacttcattcttcagccattctttgcgtttggtttcatcggggatcgcctctacatgaacaccgtacttgtcccgatagtgagcgatcagaatcgatattttacggtagtaatggtcttgcagatttttggaatataacccaatcgattccagcaaaaagacagcgtactcctgccaagtcatgtgggcaggtttttgggtattgtaatgagccaacaaagaagtccgtgcatacaagcggccaaaattcgcgccagaaacacggttgacgactttctcccaagtatccggttcgactaacgcatattgagaaagtccttttcgttgctgcaggccatatggctgacaaatccgcatttgggagagggacactccataagtgtaaagcttgtcataaaaaccattcatttcccaatcaaagtgcgcatacgccccccagacgtcctctgtcttccagtcataaagcggataaaagttgagaatctccccttgattggtttgatgcttgatccagcaatgtccttgataattgaaattccgatttaaaatagcccggtagcgatgcaagctttcttgggtacgaatgccgatgccgtaggcaaccggctcgcctttatgatgattcgcataccaaaaggcaaaatttttcagaaatttatctgggtttaaattcgcactttggtacagttccatcattgattcatcgagatctgacagcgaaatcgcatccctgggcatttcttggacccacttatcccgttcgacttcatcccacattttccactgaggttgaaaaatactagtcgtgttatcttcataaaatggcaagcagaaatgatagacctgttgaacgcttttcagccgtttgatcgattccataaagttccgagttgaacgataattggcttcgatgtctaaaatcaacaagtcaaattttttccacttttttgggcaatttggtcagctaattggaccattgctccgctgtctttcccaccgctaaaagagaaataaacatgagaaaaggtattgaatatatacgtcagacgttcctcagcagctgccaacacattgatatcgtaatatttcttcataaaccccgcttcttttacttatttttgattgaatttgtgcatgtattcactttcattataaagtgaattggggttgcttacaagcctacctcttaattgcagaatccttcttaacgaaataaacatccaaatatttccactctttctttcgattaggaaaaaaatttgtctgtctaaccctgacattgcttgagctggatcatcaattaagcggattgggaaaatccaatggttatcaaaacgtaaaaatcccactggactagttgctagtctagtgggattttccttactccaatggaaaatcatcgttcgtttttattgtttcgtcactttctccagttgagtggttttttttccacaagatgtacacaacgatgacagcaaccattaagataccgcaattcaaccatttggcatcatttaatacgtgtaaatctggagatgacaatggatcgtttcccgatagctgtaacaagatattcatcgggcgatcaaagagagttgtcataatcagtagaaaagccatcatgacgaattgatgcgtgacactccccttattttgagtggtaaatttggcgatcattcgctgatcaacaggcaaagaaggttcctgcgcataccgttgattcaaccagctgctggtcaaagattgccaaaagcttaataaaaacaaaccaagaacaaaactttgtggaaaaagaagcacaaacaatgaaagagccaaaccaccaagcagaactggaactgtatttggaaaaatcccttgcagaatacgtttgcctaagatcatggacaaaatcattcctccaagataaggcaaatacaaatagcgagtcaacgcctctgtcccatgtagacttcctagataaagcgctccaaataagaaaacaaaattccctaacatgccatttaaaaaagttagcacgttgagccatgagggcagcttccaatgcttcttcgctcgtcccagataaaatacggcacctaagaagaggaaaaagaaaccataaatcgcccaatcaagcaattggatatttgccaataaacgtgcattccgcagcaaaaagagtaacaagaaaaagattagaaaaagaagcaattctttaaaggcgatcacttttgaattcatttgcttaaagtcgatgctatatctaggatagtgggtaactgtatggtaagccatgacgtaaaacatcgtatacaagccaaatgcggctatcagcttcgttgtgcctgaccattccatcaccactaacaacaaaatcagtaagaacaatgcaaaaggcacttttttacgagtcatattgataaatcccaagttcttttcatgaagattgaccgtgcgattcgttggaactagccaagaggcactcagccctagcagactaccggataaatagaaaaatggaaaataataaacacctagaactccagcaaaggctccaacaccacccatcagcaaagcatcaatcagcagtgtataactgtctaatcccaaacgtatactgcggatgagaaaaattcctgtcatccgtaatgtataaaataaagtaaacggcaaaatcgttaaccaactcttgccatcattcaatcctaggaataacaaatacggaatcacgattaccgtattacttaaaagaaatggggtcgtttgtgcaaacgtcacgagccatttcttgattcgttgaaccatcaggaacctccttatttctctctaccaatcactcatctgtggtacgatctattgacatgtacaagtgatcgtttctcatttattataccttttctatataaagaccgcacggctttccataaaaaaagaagctaagagtcgaaggcgttattcctttatcgctcgtttagaatgtcgtttttatcacttacatcttttcttccattgaattcaatcattcgctatgctacactagcgttacttttgtttggctgacgaaccgctgccccaaccatgttcgtttggaccaactcgttgcgagtattcgtgttttcggatgctctttttgtcgcgttttttgccaaaaaagaaagtgagtgaatccaaatgatccaagtgcaacacctcaacaaaagcttcaaagtcgcgaaacgccaaagtggttttcgtaatgctaccaaagcgctctttcatcgagaggtttcaacgatccccgctttacaagatatcagctttacgattcaagaaggagaaatggtcggatacatcggtccgaacggtgccgggaaaagtaccaccatcaaaatcatgtgcggcgttttgacacctgatgacggaacgtgcttgatcaacgggcgcgttccatggaaagaacggatcgatcatgtccgagacattggcgttgtctttggtcaacgcagtcagctctggtgggatgtcccagtcatcgacagtttcgagctgattcgtgatatttatcgggtcgatccgcaagtctatcggcaaaatctggaagagctagtcactttgctcgatctaagcgaaacgttgaaaacccccgcccgttccttgagtctagggcaacgtatgcgctgcgagattgccgcttcgttgctccatgatcccaagattttgtttctagatgaaccgacgattggccttgatgcggtgtctaagatcgcagtgcgccaattcatcaaaaagcgtaatcaggaaaagggaacgactgtcatcctaacgacccatgacatgcaggacattgaagcattgacagaacgcattttactgattggtaaagggcaaattttattagatggtcaattgccagagttgaagcaacgcttctctgacgccaaaacattgcagatcgattatctaggaatcgcaccgacacttccagcaggcgtcactgtaacccaagcagaaatcgggcgattggaactaacgattgatccaaatcagctgaccgttccgcaagctatcacacagcttagccagcaagtggagatcactgatctgtctgtttccagtatcacagcagaagaaatggttgctaagttgtataaggagtaccatatatgaacaagtatcaggcactttttcgcatccgttttacaaatagtctgcaatatcgatcggcagcattcgctggaatggtgacacaattcgtttggggcatgttggagattttcgctttccgcgccttttatcagaccgatccagctgcttttccaatgacctttcagcaaaccgtctcttatgtctggatgcagcaagctttcttagcattgttcatgttatggttttttgaaaatgagatttttgatgccataacatcaggaacgatcgcttacgagttggctcgtccaatggatctctatgaccgctggttttgccaatcagcagcgaaccgctgtgcaaaagctttgctgcgctgcctgccgatttttgctatcgtctttttgttgccagtgccctatcgtttggtcttacccgaaaatctaatggtcttactgttgtttatgctctcgcttcttttaagtctgggtgtggtggtggctgtgtcgatgttgatttatatctcgactttctataccctttcttctctcggggtgcgggtcgtgatgggggcaatcggtgaatttctcgctggcgccattattccgttgccatttttcccacagccttttcgacaaatcgctgaattgctgccttttgccgcgatgcaaaatgtcccgttacggatttatagcggggatttggttggacatgcgttgtggcagatgctgggaatgcagctcttttggttggtggtattggtagctggtggcaagttttggatggctcgtgcgttaaaacgagtgattgtacaggggggttgaagatgtctctttactggaaatattttagtatccatttgaaaagtcaaatgcaatataaggtttcgttcttcttgacggcattaggccaattccttggttcctttaccgcttttctgggaattttgtttatgttttcccagttccatcaagtggatggcttctcatttgaggaagtgctgctgtgctttgcgacagtccttttttctttttcattagcggaatgttttgcccgcggtttcgacctattcccgcaaatgatcgccaatggcgaatttgatcgagcattagtccggcctcgtccgctagtctttcaagtgctggctgctaaaatggaattcactcgcattggtcggctcctgcaagcattgctcttgttttgctatgtactgccaacaagcggcattgattggcagccaatcaaagtgctgactctgactttgatgattctctgtggtgccgtcttgttcttttttctctttttgatttatgccgccatttcttttttcacccttcagggattggaattcatgaacattttcacggacggcgcccgcgaatttggccgttatccatttagcatctacggcaaacaagtcttgcggatcttgacctatgtcattccaatggcttggtttcaatactatccctttttatttatcattggttggctggagcagccactgtgggcgttcgctccattactatgcttgccatttggtattcccgccctcttgttttggcgctttggtctgagcaagtatgtttctaccggttcgtaatgaaaaaggaagtcctcagtcggggcttccttttttcgtaagtctgcggatatttcttttaaaacgataggacaaaaaagccgagcgagtgtacaagtcgatcccaattgccagccaaacaccagcgatccctaaattcaagctattgcctaacactatcacacctactattcgtatcacccacatcccaaacgctgtactatacaatggtgtcttggtgtctcccattccttgcagcacgccagctagaatgagactgatcgctaatcctggttgattgaacgcatcgatcctcaaagccaccacgatttgacgaagtgcttcgggatctttcgtgaacaaagtagcaacaatcggagacccaataaatagtccaatccctaagagactaagaataatcacaccatattttacagataaaaaagcaattcgttttgtctcatcataatctttctttcctatactcattcccgtcagtgtagcagcagccgtcgccaacccataggcaggcatatacacaaagctttcaatactgccagcaatggtgtgtgctgaataggttttggcaccaatcgccacgatcagaccaaagtacaatacctgtcccaaacgcatcactaaccgctccaacgctgctggaaaagaaattcgcaacagttcattgaaactacttttattcaatcgagtaaacaatggaaaagcaataacagaatgctgtacttttcgataaagtaatatcgtacctaacgacctggcaattaatgttcctaacgctgttcccatcacacctaaagctggaattggccctacaccaaaaatcaagacataatccactacgacattcaatacgttcgtaataataccgattttcattggtgttttggtatctccgattgctcgtagcatacttcctaaagtagacatcgttgcaataacaatagctccgccccctacaatactaaaaaattgcagggaagaatcaagggtttcttttgtcgctcccatgatcgttaaaagctgagatccagctactaaacttacaattccaagaaaaagaccagagatgattgccaacaacaacgattgcttagcgatctgctttgctttttctaggttatttgcgccgatacttcgtgaaatcaatgaagatgtcccaattcctaaagcaatgaaaatagctatatatacattcaatattgcattagccaaaccaacacctgcaacagcaaataatccgattttagaaaccatcaatgagtcaataaagcccactgtcgtttccaagacattctccacagttgctggcaatgccaaatgaatgattcgtttctggatttgcatgtcttttggcaaatctgcatttaatttagtcatattctgtcactcaattcaacttgttgtattgggtgatcacccgtttcaaggccttcatttcttcctccaaatccgatccttcactaacatgcatcaatgcatgatccgcttgggcctccaagaggatttggctgattttttgaatggccgaacgagctgagttcaactggatcatgatatccccataatctttattagcgacgaccatctttttaatcccagagacttgcccttcaattttattcaggcgtttaagtaattcatctgtttgatgttctttggcatgtgacatgtcgactcctcctttaatataggggtaccccccacccctatattaatcaaaaattatttccaagtcaaaaagttttgtttaaatccttctattgctaaagtcatttcaattatctttcctcggaggtgctacaaatccgctcatgaatgagagaaacagacagcaacaaactcacttagtgcaacttttacaagtactgtcgttctatatagtaattttacactttgaatattgttttaaacactatactgtgagaaaatcaaagaagaaagatcaacttaaaaggagcgaatcaacatgcagccatctgaaaagccaacaacccataaaacgcgcaagccaaaacgtcttgttctcatcctcctccctaccctggttgttgtagtgttgggtctgttcttgaatcacttcaattactggccttttcagggtagcaaaatagccggtgtccctgatggtcagcttgttcaactagaaaataaaccagatttaacgggtttgctactggcatatggttcgcaactaaaattcaacaccacggcaacctcattaacagtctattttgatcactatcgcaaaggtgaattaaatactcatgactcagttgcttctttgacttatgaacaagatgtttccatcagtggctatctaaactttggtattgcggaaggacagaatcatttattggtgaagctattctccaatggcgccatgtcacaaacagtcaccgatctttccgactatgactttccccttacacaggaagacagacaatttggtgctgtgactactatcaaaaacggcaaagtgaaacttgagaaaaacaaaaaaatcccgctgctttatttagcagaaggaaatgatggactaaagatctatgatgatatggcgaataatctagcaccagataacttgaaaaccttgccaaatgcctatttgatttacctggaaattaaataacataagtccttataattatctaaattgaagcagctttctattttctatgaggagatatttttttgcaccaacaaattgtgaacaaaaagagtgctatttcttaattcgttttcctttacttttttatgctttttacttattattcttttgaaataagaataaattaaaataaaaaaggagagcaaacatggaaaaatatcaagtgtttcctggtcaagactatcaggcaaaggttattggctttagtggtttacaagatgttagcgttattcatgtttacgaaaatacagctacagtgttgattcaaggtacttctgaaacaggagttgcgaaactttgcaacttttcaatcaaaactgcatcattggtgggataaaactttcagagactgaggaaactgattttaggtacaggatccccaagacagaaaaaaggcagcccaattagtgttgcttcgttgaaacaccaaaatgtataaagtatttttattttatttattcaatatctctctacattatttgcaaataatgttaaaataaaaaaacaggagatgtatcaggcttcccccaagagaatcttccccaagtgctcttgcctggtacttcttccttgtttatttttcggaactacagaacaatggtaagccattcttctacgaatttcaagtggtcttattgctgagcaaaacaaagatttactattctatttccctcaaatctcccaataaaaaaacatttcttctacttttgttgataaatttccagctacggggatctgctgataatcctatcctcgaataaaaaaactgcgaaggcacttcttgttgaagcgtcccccacagtcgttatctatgacacatttctcattttgatttgaatccttctagtttggaatagtctctgtatatacagtcttctttccatacaattcctgtgtgattcctgaaagataatcggcagagttggtgctgcgaagattatacattaggaaaatcccgtaattttcagccttcgtccgtttagcatattgaatgctttgtgcttggtttcttcctacttctacagccgctggtcctaaacggtcggcccccattccaacaaagtaaggaacctgccaagagccataatatggattccagctataatcgatcgtctttgaaacattttcattatacattgaattctcggcagcgggaccaatattatatagtgtgatcagcttatctgtcccaagacgatttctcaatgcttgaataagccaaatgaatgactgatcatttggttgaggtgtcccattcttcccgtattctgcatactcatcatcaaaatcgattccatctaaaccatacgttttcaccacttgttctagctccgcagcaaacgcatcagcactggcataatctgtgaaatttgcaaaaccagctccttggtgatttcctaatatcgataagagaacttttgtgcctcgtgcttgtaacggtttaatctgggtttccttttcggctagtgttttttgtacttgctcatttaaatgaagataggcttgctttgtcgctggatcataattgatattcgcagcaaaaatgatcccgatgtcgattgcaggtttgtccgttccggctagcgtatatttcccaatgtttctaaattcgttgtcattgacttcaacatacatcactgttttcggtgtgacttgatcggcagcctgagcttctaaaaccggtgcggccaaagaaaagagacttaaaagaaccatcaccacaaaagcaactgtgaatcttcgagatggtttcactgctagttgattcttattgttcactgtcaacgcctcctataataatcagatatttacacatcatttatgaagagtttttttgcatagagtctattgttctgctgccataagcgcagcttctttcaatgggtcatattcagggctgaccgcttcttcatacttagcagccaaaaacactcgattcacttcataatgagaagtggcacgttcgatttgttgacttaattcttgaacttggcgatcggaaaactggtcgttctttctagcaagataatgtttagcaaaagcttgcgactccgccaaagagcagccttttgattccaaaatcgccgtttttgtccagagaaagtccgtcttcaacaactgatcgtttcttccttggataccatcgcggccaatcgcataaagaaacatgcctccagtttcagttgtacggacataatttgcgacactatagagattgctggactcataaggttcacgggtatctccccatgtttgattggtacgttcttcaggaaacgagagaccgactaaatactgagaccgttcgatacctgtctttgagaacgtgttgttccaagaagactccgcccgcgtggcattcgatccatattgctgcgcacccaaaatactgaacgctgatgaaacaggagtaaatggctctagggaaaagatatctacagtatcataaatcagcagtgtatctgtgtctgacttcggtccaatatagtgtgagagggcctcgatcaccccatgggcgattttcagttgactggtagtataagtactttccatatcaaaatcaaggccatcgattcctggtgtcatatatttatctaaaagctgctttgcataatcgtcaaattcttttgctgttggttggctctgcgttgtaggaactttcaatagttcgcgataatctaatcctcgtacaagctttgttcctcgcttgtgtaattctggtccataaacattggcgacttcatcaaaaaagactttactatctgcatcactcacatttgcgtggaacacattgaccacatcaataccataaggaatatctgtcattcggatctgattattttgttcagatggaatactttgatctctccatgtgcggtaatagaccataaatgttttttccgatttatcaacagtcgtggcagatccctcaaccccaaacaaaaacccacaaagcaacaacgaactagcggcaaacaatcccaaaacgacttttttcatcaacatccatcctttcagaataaaatttgatacactttatgttagcgcttacttaatgaaatatctaagaacaaattataggtatttcataacaaattaaagatttttctttaaagtaaaaaaagaatgcactaaaaaatagcaacaaaagaagccctctattctcatgagggctttcttatccttttcttgcgaaacggcagtctcctaaaaaagaatggtgattttgataacacatttttagagcattgcttagctgcgaacaagcaattcaaacggtaaaacgatttgttccctactccgttcctggaatagacggaacgcttctcgtccacagaggtgcaaatggaattcaacggttgaaaagttcagtaatcgactgatcagtaagttttcttgaccgataatcagaggtgcttttctttccccatattgagataatattgtcgctgcgatttcatctccattggtaatgatcccgtcaacgccccggtctttgaaaaaaacagccgcagcctcgccatcttctgctttgatacaatcccaaaaaatgtcctcttctgaaaacccgggaaagagctcctttgctttagcgatcgtattgatcgaattacagctgagtcgtttactgcggccaagagtcaagcctaaccgtttaacgccttgttctttaagataaaggatgctggctgtcactgagccaacttgatcgatcgttacaaatgggacatccgttccgctggcatcttcacaaaaaacgataggaccattttcaagataggggcgaaatgtctcaatatggttggcacgagtgatgacaatcaatccatcgaaccctttggcagcgaactcttctaaatagtccttctccaaggctttatcgaaattagttggtaaaagcgtcaccttatattgttgcgcaaatgcttcttccataatgccatttagtattctatcgaagaagggatggttgacaaatggtacgatgactcccacattgaatgtttttcctgagcttagtttctgagcgatcttattcggcttatagttcagttctttcatcatggctaaaatggtttgacgcttttgttcttccacatacggatggccgttgataacccgggaaaccgtagtgatggaataaccagtcattcttgcaatatctcgaatcgttgccataaacagttgctccttatgctatgtattttcactgctgctttatcttcctctgtctagttgtagtctaccataaaaggaatataaagacagattgtggggatgaaaaggaagatttctctaccataagtgatagacaaacaacccgaagtagttctttctacttcgggttgttgattattcttcttcattcctatctcattttttctacaaaggcttttatagaaggattttggcagccagcgtcaaaacattccaaaaaacgtggggttaacgcggtgcgaaccaaagctggatccagtgctttcaaacctgacagtagtggttttgccatcacttgttttacttcattcaatatttctgcattgcgattttgtgatgctttccgttctttaggatacccatttcctttgttagaaccaaaagcacggtcgaagattgtttccaggtttagctctgcgccccagccgaatcctttagcataaggcaaagacagggcattaccattattgatttgcaaaaaaagatatgcgtcggttggttcgatacaatacccgcatatcacaccgggataggcatttagagacattaatgcgccttgtccagtgccgcagccagtcacaataaaatcaatcgctcctgaatgaagcagcagtgccgcttgaatacctaaatgaatataagtcaaacgtggattgtctttgctgtaagcttctggcagatcttctgataataaaggttcactcatgccaacattataaacctcatgaccatatttgttgccgattgttgtcaattcatttaggataattggattctttgctgcctgactaaattcgttcaaaagtgcgattttcattcttttccacctcatttatttttaaaaaaagataattgaaagctgccaaagcgttttttttcgttataaaagcggccattagtgagtcgttttctgtgaaatcggttaattcccgataaaaatgtttgttctgtctaatttcaatcggggtctgcattctagtggccagtaaaaagaccgtgtccaccatttcatcctcgtaccaaagaatgggttctttcaaaaccattattgctactttaggttcaaatacttctgtcatacttccatgtggaatcgctgtatgatgaccgatacaggtagttgtcttttgttcccttttccaaaccgtcagatagaaatttggcgatacaaaccctaaactttctagttgattggataaaaatgtcacgacttcttctttgtttgtatatgtttgatttacgaagatcaatcttggatccagcaacggcttggatgcatcggaaaaaatagagattgatccaggtacaattccccaacgagaaagagccgttcgaatattcacaagatctttgtttgaaggaagataagaaatcggaactgcagtgaccgaatctactggaaccatcgttaaataaaggacatcttttctggtagagtcaatttcttcttctcgtataatatgaatctctttgatttctggaatattttttttaatatattcagtggcaaacaaactttgggaacggcctcgatccgttactaaataagcatcaacttgactttgatttctcaatatagcggcttcgatatacaaaacgatgtaagcagtctcatcttcggttaactgtacattatagtagtcctcaaataattgacttgttgaccaaacactcaaaaagacgcgaccatagagttttttcaagtctcgggtcaattcagatgaatttttgtgcccgtatttcattcgaaaaatagcagaacgaagatggtttgtcagttcttcttccaaaattttgtcttccgtcaatggctgttgcaaaatttctgaaatagatgaaatgattgtatgaacaaattcaagcaaatcgttatcatactgattttttaaattagtgagtgctgccgaatccttccagcgcaatttatttgatacaagaatttccgcagtaagtattcttttatctacctcattgaatgttccgaatcctcttttttctaatccacgataaagggtttcaacaaaactatattcattggtgtattctctttcaaaatcatcaatcgttggcatatcagaggcataagaaaatcttccaatgctcaaaatcagcatgattcgtattttgataaacgaggtattagaaaatttgattttccaatcactttctgcttttcgaataatctcagagatttcttcaacagatattcctctggcaaatcgttgcaaaacaacagtttgtttttcatcttcttgcagaaggatcgcatctcgaatcgctacccgttttgaatattcatcacctaccaaagtaagtccttttccgggaatcgtttgaatcataatatgatgatcagcaaaccattctttcacatgactcattagttttctgaaagtaggtatactgacatataatttttcagctaattctacttgagtgataaagtgattactcgccctttccaacagcaaacaaattaatgtccattcatcattttgggaaattccttcaggtatagaaaaatcactgaaatgttttaataactggttttgtttatttggatagagcacaaataagatccctctaccaggcttcgtatcaattcgtccaagtttattttctaccaacaaatcatcgatttgggcgattttcctccgaatcgatttttcagatttgccaacatattcagctatttttttgatagaggtctccggatttttctgaagaaaacgtaagatctctctctttactaatttgtcttttatcaaatccaaagccctcctatcagattctgcctttcatcaactattcatgacccgtgtaagtaacctcgccaaaaatataacgatcctttgagccgattacctcaatgtaatctttcacaaattgcttgactcctgcttcagcagccatacataaatgcatataatccgtttgctcgtctttttttagttctctcatcatggcttcttttgcaacagtgaacgcatctgtagccacattgattttattgattcctaaagaaactgcttttcttaaattggctttcccgcaaccacttcctccatgaagcactaatggcatctgcaacgtttcttttaactctgctaaacgctcaaagtctagttgtggtatttttcctttggggtagttgccatgtgcggtaccaatcgcaacagctagagcatcaacatctgttttttgaacaaagtgtaacgcttgttcaggatttgtgtaaagatccatatttgcatcatcttcgttcagcgcttgtcctacatgtcctaattctgcttcaacagaacagccaacgctatgtgcaagactgcagaccattgccgtcttttgcaagttttcttcataagacagacttgaaccgtcaaacatgacatttgtaaagccttgattgatacattcagcaatgacttggaagtccatgccgtgatctagattcaacgcaacaggaatagtaactctggctgccagttccttgatcaatggaatcatttcttctttatgtgcatgatttttcatttgaccaggaccgaattgaatgatgatcggtgaacgctgttctgcggctgcttcgattcctgcacgcgccatttcaatattgatactattcatcgccatcacaccataataatttttattggcatcttctaaaattgatttcatacttactaacattgttgtccccctcttcttcatatgatcgcgtttcttattcttctaaagtaatgtcaaaatcgaaatcgtctgtttcactgttttctactgtttcagtttctgctaccgtttcacgtttgatgaccgcatagacaacgccggtaacaactgaaccgatcaccagagctacaacgaacattaatggattcgtcatcattggtatcacaaaaataccgccatgagccgcaactgattccacgccagatcctaccgctattgctccagcagttgcggatcctaatacggagctgatgatgaaacgaactggatctgctgccgcaaatggcagtacaccttcggttataaaacataaccccattggaaaagcagctttagcggtatcgatttgtgcttgtgcaaatttttttttggctaacaaagtggcaatgaatgccccgattggcggtgtcatccctccaactagtttagccgccattggaccgttgattccatctgctcctaatgcattggctgccagtgaagcagttttattgataggcccgcctaaatcaaatcccatgcaggcaccgattaccccaccgatcacagactttgctccgccattcagcgcaatgatccattgttggaatctatccataatgaaagctaacggtggcgagaaaatcattagaaacaacatcccactaactaaagtaactattactgggataaccaagaccggcatcaagccttgcatccaacttgggactttccattttttcacccaattcacaccataaccaatcacaaaagcgaccagcaagccccctaaaaatccggcttttgtttcattagcggtatatcctaaaataagtgctggtacaatagctggccgtccagcaatggaataggcggtgccagcagccataaccgcaaccgcaaaggccattgcataggaactcagcttgttgactccccaccaaaaacctgtccacgtataaggatccatctcagaaaacggcgtgactcccggttgaactaaatctccaatattgtatccgccaaacccttttgctagtgcccccaaaataccaccggctacaatgatcggaatcatatacgaaattcctgtcagtacgtgtttctttacctcaaatttccccttcatgtatgctactcctttccttgatcataagcctaatttttcatgaattttcttgattacaccttctggtgatttcatgatcaatgctatgggaatgtcaatgacttttttccctttgaatcgttcccgagatacgccaatatccgtagctagcaacacgatatctgcttcacgaatatctttttcagttaattcattttctaccccaatcgaaccttgcgtctcaattttcacatcatccccagcttttatggcagctttctcaattttttcctttgcaatatacgtatgcgcgattcctgctgtacaagcagtgattccaactattttcattttcttcctccttaaatctttaatcgatcgataacctcatcaactgagtgggttatttttaatcggtttaatagttcatcatcacttaattttgctgcaaccttactcaacaattgcaggtgtaattttgcaccagatacatcgtccggaaccgcaaacaaaaagaaaaaattaactggttgattatcgtaagattcccagtggatcattttgtttgttttaccgattgcgattccagctcgcatgaccgaatctgatttcccatggggaattgccacgttattccccattcctgtgatcccttctgcctcacgctcgtatacagaggcaataaaatcgtcaagtttgctgagataattttctttgtacaatagagtagctaattcacgaatcacttcgtcttttgtgctggctttcatatttagatcaataacattccgatcaaatattgtttgattttcattgactgtttccattctttcgctccttccatctcttattacacaaagaataacagaaaaaaaagaaagcgcttttaaagaaattgggaagagcattgtggaatttttttctttgctgttcaatcatgactttcagataataagacctgggcatttataagtaaaaaaatttatagataaaaataaaagcccaaaattttttgggcttttcgggttagtagatttctaatattataaaattaattattgatggagaagaacataagccaaggaaataagtaccctaagtataatagtataattctaagccttatttgctctttccttaaacacatacatccagcccgttaggctaatcactaaactggctaaaacaagccaaaacccggaatcaatggtgattctcccctctgcaactagcttctgtgaaccaatgaccatgtctcgacagtaaagaaatgttccacctgcaccgataattagggagacaatcaatgtagtataaatttcacctttactagcattgtgtccaaaaaaactgccgctcaacatttgatagcctactatcacactacctacgatccccatgagaaaaaacgcaaaatcactaggattactgaaaaaacccggcatagtaaataataatataaatccaactttcaatccccacttatagctattgcttttcaactgattctgccgttcatcataagactctttttccattctactcactgatcgaagaagtaatccatagaagagataaaagccaagaataaataagactccaataaaccaatagcctacccaggtaaagaaaatcaaatttgctgctacccacagcacgtgtaatactttctcaaaaatacttgcccacttgtttttcattcgtttgtgcctccagtcaatttaaacagctcctccactgataatttaaaataatgagcaatccgtaatgccaactctaatgaaggattgtatttgtgggtttcgatggcgttgatcgtttgacgagaaacgcccataatcgctgctaattcgccttgtgataatccttgttcctcacgtatgcttcttaaacgattgatgactggcatcttctcactcctgtcaagtttcctttacatagaagttaccatatttcacagcttgtgtaaagattcctttacatttccgattttcgataaaatccaatctatcctccaaatacaaacttattccttcaaatgttagatatagcccctcattagtaacaaaataacttatcattctattttgacaatataatctgttaaaatgaatgaatcccacctataaaaaattgattggagtgtacgagatgaagaaagtattaatcgctcttttttccgtcggtgcaattttaggactgtcgatccatttctttggactacagatcggactcgcactttttaataaaccgatctatatgattccaccttccgtctatcgattaacaaaagatgcattaacaattatggagaattatggagtatatgcaaaagagacaggatttgagaaagaaataccaaactatctagctcaagtcaaaaaagacgatacgtttgatgatgttgtgcccatgctcaatgaagccataaaggaagctggtggtgatcattcagctattattgaagtccaagaggataaagcgccacttttcaatccagctctgcttactttccctagaatcttggcagaagacaacattgtgaccctcattttgccttcatttcctgctagtgatgaagaaaatgtgcacacttacgttactacagcactcgaacaactttccaagatttctgatcccaaaggtgtcattattgatctacgagggaataccggtggcaatatgatgcctatgttaggggcatgcgctcctttctttaaagaaggtaaactattcgaatttacttctcctaacaaaaaaatccccgtcttcaagaaagacgggaaaatatgttttgaagaagataatttaagtctaccaactaacttaaactttcatcacttgcctattgctgtcttaacagatcatcagactgctagttcagctgaagttgtactggttgctcttttaggacaagaccatgtttcctcttttggagaagaaacagctggttatgccacaggggtttcaatgattcctctttatggaaaatacgctttgtccttagcaggtgcaaaaatcaaaggttccaatgggatactgtatgaagaaaagccaattcttcctgatgtcataactgaccacccggaagatgctgcactaaaatggcttaagtccattcattaaccagcaatttgagaaaatccttactaaaaatactttttttccttagattctgacctactctatctcagcgccttcacaagcgctgttttcaagttaggatttttgaaggacaccttttttagcatagcgccgaaaaacacgatggaccagtttgctcgctaatcgttggataaagacggaatagttgagtaatgcgatcaacaaaatcaaattgatataggtcgtattgccgagattaaatagatctcttccgacaatcaatgcgataaagtagaggagctgtgtgccgaagaagacaaatgttcggtacttgctgtttggcggataaattttccgctggatcaagatgtaattccatgcagtaaaaatcacacacatgatcgataaagcttgaccactgctgccgaacaagtgcccgatattaataataagtaatgttccaattgcgattgacagcgaagccgggaaggcatttttgaaaatagtagacaaaaaggcgcctttgatccgattgaaatccggttcgaaattcaacaaaaaggtaggaatgcctacaaaacaagcattgatgatcgtaagttggatcggttcaaaaggataagcggtccccgataacagtgttcccatagtgatcaagatggagaaaagcacttgaaccaaaacgagcgaccctgagcgggtaatattattgatgactcttctcccttcatccagtaccgaaggcagcgccgaaaactggttttccagcagaactaaatttgccacttgtcttgctgcatcgactcctgatgccattgcgatcgagcaatcggcttctttaagagctaggacatcgttgaccccatctcctgtcatagcaaccgtatgattcatttcttttaaataaatgaccatttcttttttttgctgtggagtcactctaccaaagatctgatagttgccgactacctctttcagttcttcggaggtaagcgtcgaaacatcgatataatcagacgctccgggaagattgacttttttggcgatttgactaaccgtgaccggatcatcgccagaaatgatcttgcactgaatggcttgggatctgaaatactctagagtagctttggcatctgatcggaccgtatccgataataagaaaaatcctaaaggttcaatcgttgcaggtaactcatgattttcgcaaatctgagggctatgtgccaatacaatgacccgatacccttgttcagccagcgctcgttcttgttttaaaacaggggcatgctcgttggacaaaagaatagaggccgcaccaataaagtaggtcccttttccttcaaaagaaacacaactgaattttcgttccgaagaaaaaggcacgacatgctgcatcgcatacgtttccttctctggaaagaagtctcttaatgccatggccgttgggttcttgtccggtaaatgtgccagtagattttgcgtgatctctgccatttcttcttctgaggtaaaagggatcactttctctactgtcatttgtccttctgtgatcgttcccgttttatctaagcaaagaacatccactcgtgctaacgcatcgatacagttaagctcttgcaccaagactttttttcgtgccagatagacggcactgatggttaaggtcacactcgtcagtaaaaataatccttctggaaacattcctacagctgcggcgacagttcgcaaaatggctttgttgaaagaggcatgcgtaataaaatattgtttaaggaataacaacgtacacaatggaatcagaatcatactgatccagcgaatgactttgttcagacttccttgaatcaagtatttttgccgcttgatcgttttcgcttccttattgattttttcaatataattttcttcgccgacgtggatgacttggcaaaatgcctcaccggctgtgacaaagctgcctgaaaacagttcagcatcaggttctttactgatgctatccatttctcctgtcaatagcgattcattcaattccaatgaaccttcgatgactttggcatctgccggaacttggtcaccattcttcaataacagaatgtcatctaggactaatttatggatcggcaatgtttctaaattgccatcacgatacacattgactttggcaacttttaacagcgccagtttatcaagggttcgcttcgaacggatttcttgaaacatgttaatgatcacattactaaaaacgacaaaaacgaataagccattctgataagaaccagttaatgccactaagaaaaagaggaggctgttgatcagattaaaaaaagtaaaaacatttgtaaaaatgattttcggatacgaattcgtcttatctttctttgatttgttgacttctccccgttgaatccgtgcttttacctctgctgaggttaatccatgtttgttttcgatgatgtctcaccctttcttcttatcatttgtcatactctcattccatcttacgtaagaatggctggttaatctataggacttccggttggtttttgcggaacttttattttttatagtctaaagaataatttatcctctcataaaagatgacctaattgtgtaaaatatagcataatatgctgctgcttggcgtttcatttttgtcacttcactgtcacgctttggcataatgttcctttctgacctcgtttgtttagtacttgaacattcagcaaccttgttctatcaacgatactcgtaatccctttctgctaaaataaataactagagaggtatcatcttttttgcgggttgttttttatctttagaaattctaaagggttggaatgaaagttaaaagaacacgcttcgacaaaaaaggctcaaaaactttttatcaaagtttttgagcctttaatgatttccgtttttttgatcagtaaattttcattcacaagtatcctatgacgctctgactaattcaaatgtttctgatccaaagagtcaatggcatgcatgagaccttccaacccagcaatgattttctcttttggtgcacctagattaaaccgcaggtaagtcttaccttctggtccataaacctcaccattcatgatcgcgattctttcttgttttaccagaacactttgcaattcatccatactataaggtaaatcttttatgttgatccagcctaagtaggttgcttctggaatagtgaaatgaattcgcggatcagcagacagtatcttctttgcttcgaaaaagttctcgtcgattgtttgattgagttcaacggcccatttcttttgattccgataacagtccattgtcgctagtagtgcaggatatggaatcgacgatagaccatctcttgctttcaatatcgtcaaaaatctttctcgtaatttttcatccaaaaagatagcataagagccacccagtcctggcgtgttgaacgtctttgatgcggaggatagcaaaactgcaggcacctctatcgaatcaataaattctaagataggtcgatgtttttctcctggacgccggacatccatatggatctcatcactcaagatagcgacgttatgcatttggcatagcgaaaccaagttggatagttcttgatcagtgaacactcggccagttggattgtgcggattgcatagcagaaaaattgctggtttttcgatagcaaatacgttggctaaagcatcaaaatcaaccgtaaaccgttccccatcattggttaaggaaaatgggatcaactcccgttcgttaccggcgatacaatgataaaaagcatcatagcatggagtaaatgttactactttgtctccttttcgacttaatagttggatgcaaagagataagctataaatgacacttggcgagtagacacaccagtttggatcaatcgtacaatcaaattcctgcaaaaaccaatggctgatgctctgcttataatcaagatgattccagcgagtataaccaaaaaaacctctagtcacagctttagccaatacttctttggttccatcagggatcataaaatccatatctgagattgagaagggcaatagccctttttctccgaaacgatcttggacataatcccactgggtcgaatacgtgccgtagcgagagcgctgttctttaaagttactcaagatcgatccctccttcatccaaggaacgaataaccgcagaaatcaactcgatcgtcgcttcaacgtcattgatgtccacgatggaatgccacgaatggcaatagcgaaccggcacgcaaaagactagggttggtttaccggcatctaactgaaccgaaccagcatccgttccacctccggctaacaaatcatattgccaaggaatttgattgctttcagcaacttccttgcagtaatccaacagctttatatttcctaatgcggttttatcggccagaacaagacctggacctttgccttgaatacgattaggatagtccgcagcttttggcgtatctttcccattggctacatcaataacgatattgatatcggcatctacttgctgcgcggcaactttcgatcctcgtgtcccagcctcttcttgaacagtccccacaccaatgatttcgacatgttgcgttttaatctgatttttgatctgagccatgatcgtacaggcaacacgattgtccaatgctttaccaataatcttctgctgattataacttttcttggcttgagtatttggcaaaatcatatcaccaatctgcaaaccagcagcttccaattcaagttttgatttggccccaaaatctatatacatctcactgattggtactacttccgacattgcatgcgttgattttggcagcgttcccaccacaccttctatgatagagccgtttttacgacaagttgctcgcacttgctgccccaaaatgacatgcccccaccatccaccaatcggatagaagtagacaaagccttcctctgtgatacggtggacaaaaaaaccgacttcatccatatgggcatagagtgcgatttttttcttttttgttgtcaaatctccaaaatagaggtttccaaatgaatctttgacgccattcgaatcaatgatcgtcatcagcacctcttgcacttgtgactcttgaccaggcagtgcatctaaattagaaagacgcattaataatttatcggttgcaatcaatagttatccactccttactgaatttcgtcaaaagttcagcattccccagatcatttactaatatatcgtcctcgatgcgaataccgaatttttctttcgggaaatagactcctggctcaattgtgaacgtcatattggcttgaattgacaactcatttttgggtgctacggccggatattcatgacaagaaagaccaatgccatgtcccaaattatgactaaaatgatcctcaagtccctctttcctcagtgcttgtcttgcaacttgatcaatctctcctaacgttttattgaaagaaaccttttgaacagctgatttttgagctgccaataggatctcataagtttctcggatctcgggttttacttcgccaaagcctatcgtccgtgtgatatccgaataatacccgtcgtagatcgttccaaagtcaatcatgatcagctcattcgcttcaagttttttctgactagcatgggcatgaggcaacgcggtacgctctccggaagcgacgattgtttcaaaagccgggccttcgctacctaatttcttgctacgataatcgagttcattcgctaagtctagttctgtcatccctactcgaatcattggcatgatccgttctaatgtttgatcggcaatctgcgccgcctgtctgagggcacaaatttctttagatgatttgatcattcttaaactttccaccatgtttttggtggtgattagctgaccattggcctccttcattaaaaagtgaagctcagtaaaagtctgataggaaatggtttccgcctcaaaacctaccttcattcctgcaataaatggtcgcattacttcgatcaaatgacttccaatcgggatctcacaaatttccacaccagttgtttgttgagacgcttgttctgtataacgaccgtccacaaacaaagttaatttattttcagtaactagtagtaagccgtttgaccccgtaaatccgcaaagatagcgacgattcgttttatctgtgactacaagtccggataattttttttccgctagttttgctcttaatgcatcgatcctcatctattttcccctcattccttttctaacctgaatcatctttaatagttgattctcgtctcaagggtaaacaatatactcagaatagtaaaaacggggcacaagttcacaagataagtgatgaccgatagaatggtttcttttgcaagaggactagtaccccaatttaccagacaagattccccacactattgtttatccgctacttgttctaacttatgccccagcccctttggctagaaatcaatatctgttaagtattgttcatcttcatctgagatgactgagttgcctttttctgcttctaataatgcttcccgctcgaattcttgtttctccaatactttgaagaatggcaaatataagccaaaagataaagcgacttgaatcacttgaatgatgactgctcgccaatcgaatcctgtgagaaacccttccataaatattggcacataaggcggatcaaaaatcgggtagttcagtaaacctagtttcatacaaatcattgggaacattcctactaatgccccaccaaagataaatggaatcatcaaaactggattcaagatgatcggcacaccgaacaacacaggttcattgataccaaacatggaagggagtaaagcaactgcccctacttttttgtatcgttgtgacttactgatgatcattgctaaaactaagccaatcgtcacaccagaaccggtaaagttggcaaaggccgataaggtaccattcgtaatgacatggcgtaatggttctcccgcttcgtgcgctgcaatgttctcggacaaatattgcactgcgattggtgaaagaatcggggaaagaaccgctgaatggataccaaaaaaccagaaaaccaaccgtaaaactaatactagataaatcacccatagcgaatctagactgccaatagccggtgctaaaatatccatgatgacttgcggtaaaagaacacccccagataaactatcggtaaccgcacggatcacaataaacagaaccccgatagccgcagtgggcgtgatcaattcgaaagaactggaaacaaaatccggaaccccctctggcattttgatcaccaacttgtgcttcgtgaagaattggtagagtttgaccgaaataatcgctatgaaaattgcagtaaataagcccttagaatcaagatagctggcgacgatattgccgttgtcatccacatccattgctacaatcaaaaaggcaattgctgacaacatcattgatcccactgtataaagcttatagtgttcacttaagaaatacgaaattgctagaactgcatacaaaccaactaaccctaatgaaacttttgaaataatcccaaaaatataaccgtagctttcaaaccaatttgcaactccctgtgtagtaatgaactcaggaatagacggaaaaattgctgcaacagaccctaataatagcactggtgtcattacgaccattccttttttgatcgcagtcaagtaagcattactatcaactttattagcaaccggcaccaatgttttacgaataaatgcttctactttttcaaaagcaccctgtttttttggactttccatttttttcactcctaattattgagttttcaatgcttcattcttacgatatgcaaccaacgcttgtttcattaccgtagccccatccatggacccatagatatccgacgttaataaaacagttggtttgttcactttatctgcttcccctttaatgaaatcatatttgtgactcaattgtggcccaactaagatgacatcatagtcattgatatagcgttccaatttgtcgacaccgattgcctccattggatagtctttttcatctaagctttttgattctttgacaacttttttcattgactccatcatcattgtcgttgagaagcctcctgcacaaacaagcaatattttcatgtttctttcctcctactttttttttgattacttattttcttcgcttttttcctttaacataccaatcatttcttcaatcaaatcgcgtgccaataagcttgtcattaaatgatcctgcgcatgaaccattaatagactagtttctgttttctcgccattcagttcaccggtaatcaactttgtctggacatcatgggcatcaatactcctttctttggcttctttcatttttgcttctgcctgttcaaaatcccctttacgggcgaatcttagcgcttcaaaagctgctcctcgcgaatctcctgctgcagagatgattttaaaaatatcaacttctttttcgttcattgtttcatccttctttcattaaactttgtatataagacttaaagtcttgaaaattcgtgattttggctagttgattgtctaacgcttggtcttccatcattttgatcatcaatcgactgatttctttatgcagatttaaatgatctttcttgatattgatcaagaaaataaccttgatttcttttttactgtaccaaattgattttcttaacaaaatgacatcgatgacttccctgatcgctgcctgctccataggatggggtcctgcgataccattttgatagatggtatcgatcattttttctctctcaagaacactgtgcttaaatccctgctcggcccacccatcttctaaacgagccgcttcgctttctagtagttgcaaataatcttctgattccgtatcaatttgaaaccactgaggatcaaataaactgagaataaactggtgtacatcaaatactttattttccgattcccgcaataggcttaaatctttttcgattttattgatttctgcccgatttaaaatcgtttttgtgtagatgatagggatagcaaactgttcctgatccagaggaacagtggaaatcagtaagtcaaaacttttatcaatctgatcaacttcgttcaaagcaaatgtggtgacttcagcattgctgaaaagccgctctaaattaactttcaataaataagaagcaccgccacccgtagaacaaatgacagctatttttttataatcatcgattaactgattcgcctgcttctcaagactagctgcgaaatagatagcaacgtagcctatctcatctttgctgatatctgcgtccaagtccttgtttaattcactgatgaacaccatcgcaacgttgaatacattggcatattgcgtataaatgtcatcaatgatcggattatctagttgatgtccggtatacagtctttgaagtaatggagcgacatgcatcaacagggcattacctaattcttgatctgttctaaactgtgtatggtaacgtaaatcgacaagctctagtgttttttcaattgcttgtttcaattgctgattactggttcgatcatcaaggaccgaaaattttcctctcagttgctcatgcaaataatttttttccatagtagaaaaagtaatgggataagccgtttccaaataggagaccaaatcttctgttaaaaggtcatacttatcggttgctgtccttacggttcgttcgtcattcgttaaagtgttattttgtgtgattcgaaaaacaagcaatcgaatatgctgtatgatattctcaaaaacaatatcgctcgctttaagttgatgctgttgcaacttttctgataaacaggaacgtagcgcctcttcatcaaagacgaagtgaaaagctttatatcgttccgtcaggacgggggtatggataatgttgcgaatcaaataaagaattgcttgtcttttcttctcttcagtcccgacaatcttcaaaccataatgtgctttgctgaataaagttaatccgtagtccttgcaaaacaattcgacttgtttgatatctgctttaactgttgaaagacttacctctaaccattctgaaatctgctgcatcgtaatgtattcttcatgaaacagcaggagaagttcgatattcttaattcgttcgttcgggttcccgttatcgatcttttcttgacgttttgcatgagataaaaatcttagaaacttttttttatcagaaatttccagttgatagcctgccgaacgaatccgctctattgaaaatccttctgttcgtccgatatctcttaaccacttgatatcattagccaaggtccgctcagaaatctgaaattcagcggccaatgccttgggagcaattgcttgcttctttgcatataagtattcaacaattttttcttgtcgcataatttcctcccgccttcacataaactatacaatgtaagccctttacttaaaatggcaactttttccgataaatgatgcaagaataatctgattcaaaagaataaccatttccttctacgagcaaacgattcggtttacataaccgggatcgatcgatatttttctgaacactgctgatcctgcatcatttcagctgttagcctcattcaactactccattcgcattctaaaaaagataactaatatacaaaaacaagccaaaagcctcgttacaaagctgttggcttgttcaatacagaaccattattgatcgaatcgattcttctatttttgatcaagtatacttctatttatacaccctaatcgcaggaggcacaaaatcagtgacaaatgcgttgatttcggcaagtgattcggcgaaaagaattttgtcgaagtcttcttgggtcaagaacccttctgttaccattgcctggtattgttgtttcaatggatcaaaaaagccgttgaaattgatcagcacacatgggttggcatgttgcccgatcctgccccaagagatgacttctgtaatttcctcaatggttcccggtcctcctggcaatgccacatataagtcagccagctcgatcattttttgttttctttcatgcatattcgagacaacgatcagtgacgtaagattctcttttgctaattctcgtgccaccaagaattctggtatgatgcctgttacttcacaattttcttcaatagcggtttcggcaattattcccatcaatcccgcattaccgcctccatagacaaggttatactgattttcacctagccatctacctaattctttggtgatttgcttgtattcttctgaacttccgatacttgctccacaatagactgcgacattcattctcaaatgatcccctttcgatctgattgcacttcatgttattatagtcgagaaataaggagggctcaatatgaaaatcaatgaatacaactcatgggtgatcgacttttataaaaaacggaactggtatcaatatgatccttttattcgtgttggatttcttacggaagaagtaggagaactatcccgggccattcgcggcgttgaaattgggcgagatcgacctgatgagtctgcaaaagatcaagcctactatcgagagaatttgatggaagaacttggcgatgtctttgacaacgtattgattctcgcagataaatacgatattgctctcgaagacattatgggtcatcataaagcaaaactggaagagcgatttaaagaggaaggatagcctagctgctaactatcacttatatttcttttcctacgcgttatcttgcgttatcctaagttgtgcgcccagttgatcacctgtcattgtcaacgagttagctaagggaaaaatattgtcagattttctagtctacttgaagcaaaaaaaagggactgtgccataagtctcctacaagtaacactagccgaacattaatgattattgctcctgcggtgcagggactcctcgtcgcaaaagtcagagggatctatcctagcaacagactattattcggtttaacttgttggatgatgacttatgtcatagtcccgtattataaatcattattacagatcaacgattgaattttttgctgcctaatttcatatgaaattgcggatcttttggtgtggaaggatcgacacctcgcaaatgaggaatttctccacagatcaattgcaataagacaatgaaattgaacgtcataaactctggatcggtggtcacaggtaagaccagatctgctgcgtctgactcataagtcgtaatcagaaaaatagtatccgaccattcggacaaaacttctttcattttctcagaccttggctcatcgccgttgtctaaaataaagaccatcgaatcttcattgatcgcattatagatgccatgaataaactcttcaaattcatatccactcaccggacaacgcatcgtctctaacaacttcagggcactttctaaaacatctccataaatagctgccggaccagtcacacggatttcttttgcagtgactaatcgttcctgatttgcagaaatccattttaatgaagtctcataaacagcttggaactgtccagcagcagttttcaccccttggatctgttgttcaaatgtctcttcagaaatcgttccttgctcaagtcccagatagagagcaagtaataatagattcagttttgtacaataaaagccctttgtttttgcccctgctttctcaggtccacaatggacagtcagaacaaaatcagccatttcatcaataaatgcttgttcttctcctgccatggaagcagtgatacaacctttgcttttcgctagtttcatagcgttgtaggtggaaaaagagctacctccttgagagattccgacaactaatgtctgttcattatcacttaaaaaagtctcttcagtgatcgtgaaaggatagaccgctcttacttcaagttgtaatagtttttgcatttgcggagccatttgcaacgcggaatgatagctcgttccagaccctgtcaaaaaaatccgagtgattttttcttttttgatacttgaaaaaagacggtctcctttttcgataatttctaacaatttacttggtgtctcttgtaaatactcttgaattgatgccattttttctcctccaatattatagaatgccaatcaaatgaacagcgatcccaaaaataataatgccgatcgtaatcttagtaatgctcgctttttttagcagcttataaatgccaaaggtgaaggctagcggcagcatctttggtaatatctgatccagtatatcttgaaccacgatttctgctccgctgatattccactttaatggagtcgtgatattcagcatcgtcgccaccatacctccaacaacacataatccaacgatcgttgctactgccataattttatccatcaagccctctttttggatacggtccaacgaattgacccctacttgataccccagtttcaatccaaagatccgaaccaatatatttggcaaattatacaaaactaaaaacagcaatggaccaaaaagattgccatcttttgcgatcgatacaccaataccggcagcaatgatccgaacagttccccagaagatcgaatcaccgatcccagctaaaggccccatcagtgatgctttgacagcgttgattgattggacatcaaaagccggattgttcgcattttcttcttccatcgctgcgctgatacccatgatcgttggtactaccgctggtgtcgtgttgaaaatttccaagtggcgtgtgattgctgctgcttgatcttctttatttctatagagctttttgatgactggcaacatggcatacatgtaaccgacattttgcatccgttcgtagttaaacgcaccttgaagagcaaaggaccgccagaatacactttttagctgcttcttctcaatcttattcaaaatcgatctctccttccgtcaagttatctgggacactggggatagactctttcttctgttcaatatagaagtgcaagatcactgcgatacaagcaccgattaaagcaatcgcagtaatatttagtcctccgtaggcagctgctaaaaagcccaagaaaaagaagggcgccattttctttgaaaaaagcatgtccagcaacaaagcaaatccgatggcaggaagcagatttccagctacagataacccatctaatatgacatttggaacagcttcgatcattcccgttaccttatccgcacctaataaaatagctaagaaggttggtagaaatgtacttaaaaagaacaaaccaactggaatccacatacaaaaggctaatcctttgtaatttgcttctttcgcatagctatctgctttgtgggtaaaataagcattgatgatccgaaccaatacgcctaaagattgcgctaaaactgcgattggcacagctaatgctaaagctacttcaacaccgctattagacaaaatcgcaaatgctgttcctaaaatccctcctgtcaccacatctggcggtgtagaagccccaataccggcgatccccatccagatcaattcaagttgcgccccaatgataattccattctttacatcgcctaaaaccaaccccaccaataaaccggtaacaagcggacgatcaaacatcatctgaccaaatattctgccatctaaaataccgattccagcaattaaccctaacattattgcttgagcaaccatcgtgtaaccctccttcttctaaatgtcaaagtccgtcaacaatttctttttatctctaggcagcatccgaaattctacttggacaccggcatccttaatcatttttaagttagcgatatccttttcgtccactgccactagatccgttaatttctttttcccctcgccataacgcaaacccccaacatttaatgtggtaattaccccacctgaagcttcgaccaatcggcgagcatcctcggtcgtcttaactaaaaccaagacattactcttttttgatgatgcaaatttttgaacgatttctccggattccgctactcctcgaatgtatagaacaacattggaaggtttcgccagatttaaagccatagatttcatttgatcatttttggcatcgtcatttaccactaaaatcgtattgatccctaaggccgtcgtccagccaaaagctacttggccgtggatcaaccgatcatcaatcctcactaaagatatcgtcattgttttgtcctccttgctgtttgattagttgattaatgtgtaaaattcctttcttcccttcttctattcccctaagtacccaatcctcaacagatagctcagctgtttcctctgagagtatgagagaaagtaacataggtaaattgacaccggtgattaactggaattcatatccgtttaataaatgattggtaaatagatttgccacacttcccccaaagacatctgttaggacgatcaacgtctgatcttgattctgctctaagtaagcagtcatctctgcttccgcatcatcactcgatttttctttggtcattgaaaaacaatcgatctcgatatcttcaccagcaatcaatttcaaactatcaataatccctttagaaaatgtgccgtgggttgctactaaatatttcatctcttttcctcctcactacacttttttataatgcaaaaagcgtgccaactagtgacacgcttcgaaaagtcctcatctatcagtcaagaaaaaggatattatggatatagcaaatttctggcaatggaatctgcacactatagattgtttccagcacactgaccgcatctttgatcactctgatttcacgttgatgaataaatacaaattgttcaagatctgcaaattcggtaatttctacttgccgtatcaaacgctctaccatgcaggagatatgaacataaagaccgatttttcgtggattcgttaacttcagtgctaatcgttcttccagtgtgacaattaattcttctatgatcgacatgattttttgagtatctaaaatagttaacgaatcgaggactcgaatgagggaaaaattttttaccatccgatcattcacaatcttcatgccattttcatccaaatcaacgccaaagatctctgacattttttgcgcgttcccaccagagataatggtttctaaataaacaaactcggcctctggaatcagaggatcgtcggttccaataatgcctaataaattatagtgttgagaaatactagcgggtatcccgttggtaaccaattcactatattccatagggaaaaacgctacctcaagcaatccttccaaacattccgacaacattttttgaatctgaatcgctgtacctatcccagtaaagcaagtggtgattatcgcgtttttttgagccttttccggttcgaacagttgaatgttcggtgagatcgattccttcatccgttccgcaatctcggttaaaggagtgccttgaagcatcatattgccaatctctagtgccatcaaagtccctagctgatccatacacaaaattggaactgctacggtctttttcaataaatcatagatcatattcaacgaccccatatcaattaggattaccagtcctttgactgttccgttttctcgtacatactcttctacctttgtagagatgtcatgaatggaggcctcgattggcatatcaaagctggtaaatattgactctcctagcatgcgattacacacattggcgatactgctagcggttgcgaaaccatgagcaatgatcaatccatcaatgtctttgctctttcttgtataacgtagtgtcgaaaagaataatgagaagagattaatgtctaatgaatcgaactgaatatctaaacgtcgctcaatttcaggaaaaattttctttagcgtttgccgttctttcccataatgctgctcaatgtaggcttccagcaaaaattcagaaggctgagaaacgaaagacgttctcaaaatatacttgtaaatgtagtgagacacaaatagaacgaagcttccatcataatgaaagaacgcctgatattcgatttcccgaaataattcttgcatcgtttgatgcacaaactcttccaaagcaactggtttttgctttgaatccgtaaagactaaccgatccataaagccaaccacttgttgatcgatcaacgtacgcatctccgcatcctcatcattttttctcaacgaataaatttgatttaatcgatgaataaacgcataaaggtcttgccggccatcattttcggaaagagattgtttttccccgtcgaaaacgtaattagttgactcagaaaactggctaacgattttatttcgaggaagcgtatacatttgtgcaggcagatccttgatggaaacatggacttcatctgaagtaacattttgagaaatcgcactgccgcaaacatacttaatggcattttcaatttcaccaatatttcctgaataaatggtatgaagaaaaatattcattacctgcgagctgaccactattttcttttcaagccgtttgctttcaacttgaaagagcttctcgataatttcttttttttctaaaatactgcgttcgctcagattaggtaaatagatagtaataggaattcgacgcaaaaacgtctgtaaaaaagcggtggttttctcagttgtcgcgaaggccaatcggacagttgcttttcgctcggttgattcaccgatccgagaaaaggtccctttatccatgaaagtaaaaagtttctcctgtccttccgcattcaaccgatggacttcatctagaaatagtagaccaccattcgcatcttctaataacccgcgcttcttttcgtaggcaccagtgaaggctcctttggagtaaccaaacaataatcctgacaagagctctggattattataatattgtgcacaatttaatactttaaatggagctgtttctgatagaacttctgctttgaccatatattcatacatgatttgcacgaaataactttttccgatgcctgtatcccccattaccataacaggaagaccattatttggataaaatacagctgtcttcaattgttcaatgggttcagccaaacttttatcgtaaccgatcactttttcaaatacacgattgataggtactttctcgattttgtcacttaactcttttactgaattcaggacttcagatacttcgatagcgaacttttcttgataaccccctcgattgccaaacaagacgggccgtgtattgattttaaaaaaaatgccttgatcaacaaaacgattggccaatcgactcgcttgtgttcgactaaaggagagttgagcttcaatatcggctgttgtaaacagtcccgattcaaccgcttctttagtagcacgattcgctaattctcggctccatgtagtcacttctacttcaacattcatttctacacctctttctttgccctcgaaataacaaatgttaaaaaagagtataccacggaaaaatttcttttaaagacgaaattaaatctcacagagaatcgctttcatttatttgttatttcatggcctgtccaatgcctcatactttctgtttttattactaaacaactttgtcacaaaaaaacatcgaagctgctcaaaacgcgcttcgatgttctttagtaattttatttttacaatgaaccaagtttccatataaaaagctcattatcaacgaacgaataggattgtgttgttattcgaaaacttcttaatgatgtttgtagctggcatagtaaaagccggatacaaatagcgcacctccgatgatattcccaatatagacaggaataaaattcgcaaagaattccaaccatgtgccgtggccttcgaagatcgctgctggaatgacaaaacaatttgccacactatgctgaaacccgatggcaacaaaaatcatgactggaaaccatatcgtcaatactttcccagccgcatctttcgcaccataagacaaccataatgctaaaccgacaaaccagttacagccgataccagaaccaattgcttgtaaccaagacgcagctattttgtgatcagcaaggtgaatgatttggtctaaataaactcctgaacttgtcaatccaacaaagtgaccaaaaaaatacgccacaaaaatcgcaccgaccatattagctaaggtaatgatcagccagtttttcactagttgcagaaacgtgactttcttatccataaaagcaatcgctaccgccatcatattccctgtaattaattcaccgcccccaagcaggatgacaatcaatccgattggaaaaaccgctgctccaactagactggtgagacttgaaagtgattctggaatagaggcagagactctaacataggctaaatagccaagagaaatcatagcccctccgatgaatcctaaaataagtttcgcaatgatcggtttttgtacttttttggtgcctagatgaatactaatgtccataatttcttctggtgtgtgcataactctttgatccctacttttccaatagattttctgataaaaaacaatagtgatttccttcacatttccatcaacgattataacaccatcgtttttgattttgcattgttattgtaaaaaaattcactaaattttcatcagattctattaaaaaaaccccggttaaatcaacgtccgttgtttaccgaggaatccgtttgtttttgatctgggaaagcactctagaagcaaatccccttcttgagttgaatatcttagaattgaatgactaattcagctcttttattatttaaagtcctttcctttaaatgcgatggcatccacttgaaacaagatgcctacctcaccacggtgcgcaaaagaagtctgaatagactttctgacagggtattgtccattaaatttttctttgatgattttttccattatcggaatatcaaagatatctttgaaaagagcgtccatttggaccacgtctgctaacgtaagtcccgctagtttcaaccgttcttccaagtgatcgaaagcaccgattatttgttgttcgaccgattgtccgatatttccgacacaatagccaacaaagactaaattcccagcctcaatcactcctgaatttgcccaatctcggttaatgtcatagcgcttcatctaactcgcctcctgaaataatctatttgaatttttgtctgaaaaaacagcctctagtttcttactaaaatacataaaattgttctgctttattccaacgagatactcaacacctctctcactttttctgcacctttaattatcgcctaccacttagaaaatgaggcgacatgtttggtgttaaaaaagaaaggttgcgtcttgttcccttatcttcaacagtgaatcaacacagcgattcgaacacacgtggtccatattgctgctcgttcgatagctcttttcgctaatcgctttgatccttttagaaaataatctccaaccaggcgctggaaaagcatagttacgtctcagacttttactcccaccaatgattacttcagcaaggcaaacaaaaaagctagttgatccttctatcaactagcactagtggaaacagaccggcagccactactccccgagtcagaaacgaaaacagttaggtagcggttaatgtctttttgctcactagcccctcctttaagcagcctgcttacgaagatatatcgagaatttttctaaaagctgtcgactggatgatcttactaagaatggtataagtttgtcgatcgttctttctgagcaagtttaagatattcgttacttctgcgcgatcttctgctagaaaggctttaaaaaaagcaaagtagagctgcgtggtcagagagaaggtagaatcagtaagcgattccgtcaatttttcatctaagagtgatgccttctctaactcattatttgtaatcaagaattgaatcatattgacatacaatgcgccgattagtcgatcaatcaactctgggtaaagtgaccaccaagtgattgcggcagcaatcgcttttgagagtaatggctcaattcgttcttcctcatcaaaaaagataaaaaaagttgtaatgaacaattccagttccatcattgaaaaactctcaagacgtgtgaaatattctcttaaagtcactaaaggccagtgatcgatggtcggttttagtgaccaagccaaagcatatgctgcagagctgatcaaccgatctgagcttatctctgacgctttattgtccctatagatcactaataacttatcgacagaatgcagattgaagtcatagtaaatagcaatgacgtctctaatcgtgattcgtttagttgcaggattctccttatcataaaggaagaaaaattctggttcactcatattcatattttctaagatacgcttgaatttaaatgcttcgatcgcatactctcctgcttcaaatttcgcataaaagctgcgggaagctacacctgaataaacttctttttgagtgtagtgtttcgacattctgatttttttgatcaatgggccatacgccttcatctgaccactccttttcacgtatagtatactacacatttttaaatacgggggaacatttaccgatgatatagtaacggtaacaagtggaaaggtggtgttcagatgaatacagtactaagcttacaagcatttaaagaagattctgccgtttctccaaattcaatctttacgtttaaatgtcaaatctcactaaaagtaccagcaacaaaataaatgcgattaaaaaagaatagaatactcccccttggtcattctaatcttttttaattagatacaaagagatgtcaaagtcccccttgcttaggtttgatccttgtcgagcaaaaggggaataaagccagtttttcaaaaaaatgaaatcaatacgtcaagaaaagagggaatcaatggatttcatcaatacattccacttcatctatcctgatctaaaaaatacatatacagatcaagcatttacttatttaaacattaaccagaacgttcccaagcaaggatggaaaattcatgtttctgctacttatactaattattttttgatactgagcgaatgtatctcatgctgtatcgaaaatgatgtagatatgaaatttttgaagaatcttgatcagtttacaaacaacctttctaaaagtacccctagagcctattcaggaaagttcatcacaatctatccctcaactttagagaagtttattgtgatgtgcgaaaagttatatacccgattaaatgattttcagggaccttacgttctttcagacaagagatataaagattgtaaagtcctctactacaggtatggacgttgtcgagcggacgaaaatgaatcagagacagaaagaaagcaattaatttgtcccgatggctctattatcgaagacaaacggttgccttattattctcagccgccttttgtacaagatccttttcatgatagttcacaacaagagaacccatctgcattgctgaataatagatacaaagtagaaacagctgttcattactccaataccggcgatgtatatttaggaacggatactatcggcaatcgaaaggtgattattaaagaagcgcgcccctatatcgaatcctcttcatcaggtgattgtattgacatgcgcaagaaagaaatagccttctttaacctttttccgcagtattgcccaaaggtttatgacagtttttacgagtgggagcattattttacggtagtcgaatttattgaaggacccaccctctctgagttctcagatcgagtagttgaagaagtgtatttcgacgatcttactggcagctatcgccaggatgctcaaaagataatcatcgagttaatgaaaatgatagtagcgattcataaatttggaatcacgattcatgacatttccaatactaatattatgttacgagacggacagccagtaatcatagattttgaaggtggaaaatttgcttttgaacaatacgattacatcgtaaagactcctggttttgataatggggatcattcaatcgacagaatgaagcgagattatgtttccttagggctcctgattattaaccttttcatcggaacaaaccaactggcgcaattggatcagcaagcagcactggagacattttatctttttgcttgtcattatcagctagaccctcgttattattcactgatcagcaatttactattgagacctcattcgacgaaccttgaaatccagctccatcttatgtgcacccacccacttgaagccgtctcattagcgtataacgaaataaaagaaaatctattagctgatgatctttccaacgtggataagaatgcagttcatttgatcgactcaaaaagcagttcggttgatttaacagacttagcaaacgaaaaagaactattcattttggcttatctcagttatttaatggacaatcaaaaaataacttttacaaataacgtagatttctcttttgaaaaaataggacatgtaaataaaaccggttcggttgattatgctcacttgattattcttgttttggttatgagtccagcagaaacgatcaatcgattgaaacctatgattcacctctggatacaaaaattaatcggttctcagaatcaagatggcagctttatttcagaatttgatggggttgagggagaggggcttcttgatggtgcagcaatgatcgtctgttcattggtggaagcttatcgtttttttcgtgaggaaagaatactccagagtcttactgattggctgaactatacagaaaaatttggcaagacacatttcccgcaaatcagtaaaagaaatgcgaataaatcaccttatttggcaaatggtaaagccggtctgctactggcaaaatggtatgttttgcgaagtggatcagggacagaatccatgaaaaatgaaacctttgagcaaataaaagaactgccactggtttcttcaaatgtcagctttggatacggtattagtggtatcgcctatttgaaagttctgacaaataatctcaaaagaaacgattacaactctctattaacgaatctactatcctacaaggtcaatttcaaaggaaagaatcgatacccggactgcaccaattcaagaatagaagcgagatttctcacaggggaaatcggcgtcttattcttagtggattgtatccgacagagattggaggatcatcagtgaaaacactctataaacattataaaagcaatattcttaaaattttgttgctgtcaggcctcttatcctttttacgcgttctgccaagttatctactggcttttgccacgaatgctatctttgccagaaatatcagccaatttcttttttgggacctagtgattctcattctttggctgatttatgtctgctcaaactatttattttcagtttatcaggagaaagaactacaaaaaatcagtctttcattgcgaaaacgtgaagctgactctatcaagacagtcccattagcagacttcaataaaatcacggctgatggctatgtgtcgaagctgacaaatgatatcacacaaatcgaaacgcagggcgtgatgagtttatatcgtcttttttctaacggatggttgattttgttctcaattgttgcattggccctttttaacctttggctggtcgttttggtccttggtttaacgggattgatcctttatatccctaataaattcgggacagtccttgtggcgcttggacaaaagttatctactagtaattcctcttatacaaaaaggattgccaatatcttaaaaggttacaacgttttccgttacaataataggctggcagaaattccaaaaaagattaccgaatactctcaagacctttctgagaataaggttgccattgcaaaaacaaatcacaagattatgaacctcattgctttttctagtttattgagtcaagtagtcgtagatattgtgacaggctttctggcaattatcggacaaacgacgattggagctattagttccagtggcaatttagcagcaaacatctttaactctgtatcgttggtaggtcaatcggccatggaactaagatccatagagcccgtcatagaaacatttgttgttgataagccaatcgttcgcgccacgaaaaaaacctacaacgaattcactgattgtatacgaatcgaaaatttatctttcggctatgacgcaaatctcccgatcctagaaaatttcaatttagacataaaaaaaggggggaaatatctcctcacgggtgatagtggcagcggaaaaagtactttattaaaaatcttgattggtgatttggaaggctattcaggcgaaataaaggtggatggtcatcagttgatggatgtggatagccactcttttattcaatatatcgaccaagacaattatttgttcaacacttcttataaagaaaatgtcgctctttggaacaactacgcaaacacagaaatagccgaagcattgaataaagccgcggcagattttgtagatgatattgacaaagtagttgaaaacaacggtaccaatctttccggtggacaaaaacagcgcattggtttagccagagcctttattcaaaaaaaatcagtcatcctctttgatgaaggaacctcttcattagataaaaagaatacgttgctcattgagaatctccttttggaagacaacgagttgacggttgtgatgatcagtcatcatccactggaagaaaaccttcataaatttgatcaaattatttctatcagcgcccctttaacgcccgaatatcaacggatggccactgccgaaggttaacagttcatgaaccgtggagcaaaaaattctcattattataaatcttctgaaaaaaagtgcctcccaatttttggaggacacttttttggaagtcttttattcagattttaacagctgatgaaaagctgttcgcaactgctgcatcttctgtgtagcggatggttgatttgacgcattgacagaataataaattttaaactttggttctgtacctgaaggtctcagacagacccacgaaccatcagtaaatgtatattttaggacattggatgatggcaatgtaattctttcgattgattgaccggcaacccaccgttcagaagtcaggaaatcttctttgaccattaagacaaaatcccccaaatgagaaaatgacagggatcttaaacgatctagctgctgattcatttgcgacaatccatctttgccaggaaaaacttgggtttctaattgttcctcgtaataaccataacgttcatagatttcattcaagcgatcaactaaatcaattccgaaaaggaaacagtccagtgcggtctcaactaataatacagctgcttgaatcgcgtctttatccctgacaaatggggctaccaggtacccaaaactttcttcatagccaaaaagaaaggttttatcttttgtttcttctgataattggatttgttccccaataaatttaaatcctgttaacgtgtttctaacttcaatgccataagcttcggcaatttttgcccctaaatcagatgttacaatcgtttttgcgataaatgaatttgctgcttgttttactcgaaccaaataatcaagcaataacacccctatttgattgccatttagaaagactggctgtccgtccttacgtacaacagcacccaagcggtccgcgtctggatctgtggctagaattagctgtgttggctgtgtttgagcctctttcaatgctagagtaaacgcctgttggtcttctggattaggagaagagacagttgtaaaatcaggatcaggcagttcttgctctttcactgtccgaagattcgtaaatcccaagcgttgaaaggccttttgtatcaatacatttccagtaccatgaagtggggtataaaccattgaaagctgtgagccaaaatggcggatcctttcaggattttgggccacctgaatcaattgatctaaatacaacgcatctacttctttcccaaaaatatcaatcaactgttgctcgacataagttgacaataaatccgcttcgatcattaattcattttgaatacttgctaatattcccatcaattcttcggcagttcctagtgtaatttgaccgccgtccgaagcatacactttaaatccattgtattgcttaggattatgactcgcagtgatcatgacacctgcaaaggctttataataccgaactagaaaagacaattgcggggtcggacgtaattgatcagataaatagacccgaatcccctgactggctaatacgcgagcggtccattccgcaaatcgtttagaaccatgtcgattatcaaaagaaatcactaccccctgttgttccgcatgcgctttttgaacatagcgagctaatccaagtgctgcccgcttaatggtgtagtcattgattcggttgatgccaacacctagctctccccgcatcccccctgtcccaaaagccaaatagtcataaaagtgttcttctatcacagcaggatcagacagagcgagcagctgatctttcaagtttgcttccaaagatggataatctaaccattcttgatattttcgttgccaattcattttgtttcctcttttaattgtttgagaatctctgcaatcgacaaggtgcagccagccattgaagtatctgctacgccataatacatcgtcaattgatcgccaatttgtatgccaccacagccaaagacgacatcgccaaagaacccattcttttcatagtctgcttcaggttccatgattggtttttgacttctagcaaggactctcgttgggtcttgcaaatctactaaggctgcacccatacaatagcgatgttcaggagtcgcaccatgataaataatcaaccagccttcgctggttttaataggaaccaacccgccacctacacgcccactgtcccaacaatcttcacgaatccctagtaaatgccggtgctgtccccagctaactaaatctggcgaagaagcaatccaaatgtcatagttgccaatgcttttcagagagggacggtgtaaggcgtaataacgcccattgatttgttctggaaaaatcagcacatctttgttctctggtgcaaagatattccctaaatcttgataggattgaaaatccttggtagctactaatgaatcacaaacacccattggtgagacagaactaaagttgatatagtaaatatcgccaatctgtgtgcatcgcgcgtcttcgatgccatatgattgatattcattgaaaggatacaagaatgcctcctcatcaatcgtaaaatgatgcccatctttactgcgggcaattcgaatataagaaagagatgtcagatagacaaaactatccaacttgtcttttttgcggatcattctcggatcgtcaaaatcataatctggatcatctcggtggaatgttaatacttccatcgtttgtgttcttggatcaaatacaggcgctttaataacgttaaggtcgtcagagattgggcgctctgccacacgtaataaaagtaagacttcatcgttgtattttgctactccaccattaaaggcgccaatcacttcatacccttcatgtaatggtttcacatctgcgggagtgatcaatggattttcattaaaacgttctattttcatctgcttaacctctatctaaatggattttctagtttgattttctgcgcgcctgcatcactgatgccggcatatagtacaatatgatctttatatatatgaataccaccgctaaagacgacatcttctaaatctgggcgtttcattggtccttgttggaaatcgtttctttctgcaataatttttgcctgtgtcatagcaaattgatttcgttccagacagaaaaccatcgcataataatgacgatttccttgatcatcgaaattctcgatatggcctaagacccaaatgtcgccatcaatctcatggatctcattgccgccaccccattcgctttcacagaactggtcagacagtaacggggcttctgtaattgtttcaatggtcaaatcactaagagtatgaacgatcgttgcacctatcttgcctcggccacctttagttccttgcggtcgtgtcagcactaggatttctccagaagataattgtttcaagcgcaagtctttcatcccccacggcccctcaaagattttctttgcttcggaaagagtcgccaagtgataaaaaaccgtacgccaattcgctgtgccatcttctagaaaaacaacttcaacccccccaaggatgacttgtccgtcaattcgagtataaaaaggatcctgtaaagaaagttcgatactatcagcgattagtgtccacctgtttgattcaacctcttcaaataaactgacagtggaaacttcactgtctcttgattcaatgcgacctgcaatcacttctttccccgccaattcaaaaggggcagtgatattataaacatcttgatcacccacaccgctaaatcgcaaaattgcggcttttttgactactttggctttctcatttcgatattcctgcaataattgcttgatataaatcatagctgctcctttccaatccaacatgcctttgccggcagatgaacccagtgaccatcttcacttaacatgccatttccaaaaatggtctttcgatttccttctaacgagtgcttgatcggctgtccaaaatttaaaataatttgtaggctttccgtttgataactcaagcaatctcctgttaactcaatgttgcggatggctgtaaaaggtccttctgtttttcgcaaccgaatcagtttttgataatctgccaaaatccccttcgcctcctggttcaccgctgccaatccgatccaaccgctttgctgatttgatagccaaggaagcatgcccctcgagcggtcacgattcacttggttggccattattaaagcgtgtgactttcctcttaaaatcagttcttcttggtatttattttttgcttgaatatccctgatatcagctagctgctgaggcaaatagtcaccgacaccttgttcttctccctgaaataaaaagggaatgccacgattgatcaacagaaacacggtcaataagcgatagatgtcgcggttttcatttgcaagccgctgccatgaacggctcatatcatggctgttaaagaacagcgtaggcattttcttttgttgactcatttctttaaaatccctagctagtttctcaagatccaatgcttccatgctgcccaaattaaaatgaaatgcggtatcgaacaatccatcttctgtataactgttgatcaatgagagttgatccgagctaatttcagccactgtaaaaattgatggatcgactgctttgatccactgatttaattcctttaacacacgtttgatccccggttgattcacatcattgcgatgatcttgtttcccatcttttcccactggattatcaataaattgatcactgaccgtcaaattattgatgacatcaaaacggaacccatcgacacctctgtctagccaaaattgcaagacatcaaaaacggcttgtctcacttcttgattctgccagttcaagtctgcttgctcttcggcaaagctatggtaataatattgatccgtagccgcgtcatacttccaagcagaaccacaaaaaaaactttcccagttgtttggttgatcttgccatatataccagtcccgctttggatgttctttgccactggctgattcgatgaaccaaggatgttcggtagaagtatgattaactacgacatcaatgataattctcatttctagctgatgggcttcttccacaaggagatcaaaagcggctaaagtaccatactgaggatcaaccccacaataatcggagacatcatatccattgtcaactttaggcgaaggataaaatggtgttagccagagggcatccataccggattcttttaaatagggcaatttttcacgaatcccattgatatcgcctattccatctccgtcactatctgcaaatgaggcaatataaatttcataaaatacagcattttcccaccacattcgttggtctccttacttcagtgtaaattgcattccatcttggaatcgttttgaaaaaatcaaaaacaaaaggatcaatggtaacgtgagcaacacagaggctgcatacattggtcccggatatgtcccataaggcccaaacatttgcgaaatcaagacatttagcgtaacagtggcgtcactctttgaaacgatcatatcccaaagcaggttcgtccaacgatccgtgaataggaaaagaaaaatcaccgttgtgatcgacttagacattggcaataccactttgaataacacttgcatttccgttgccccatccaactttgcagcctcgatcaacgcatcgggaatggctttgaaaaagttggtatacataaaaatcgcccataaactaattgcagtcggaatgatcattccagcataagaatccaataatcccactttggtcaccattagaaattgggggatcagcaaaatgatcgctgggaaaaacatttgaaagagaataaaatgattcacgaatttcttccctttaaattcgattttggcaagcgcataccctaccatcaatgcaaagaccatcattaaaaacgttgcgatcgtagccacgatcgtggtattcacgaatgcaccgatccaaggaacatctgctgaagtggccgaaccgccaaacagccacgtccaagaacgtaagctaaaagtggtcgggataatttttcgatcgacttgatcccaagcagcaaacgagtgcaaaacaagatagacaaaaggaaacgtcatgaggagcatcaccagggtggttactagatataggacactgttctttcccttcgttcgtttattgccaaccatttttttcaccccacttttctagtaacttccgaataacgccgatagatgcaaaagtaacgacagaagccattagtgcaactgcagacgcgtagccggatttcaaattaacaaaggcttgattgtagatttccatttgccatgtattggtcgcaaagtttggtccgcctcctgtcaactggtagacctctgtgaagataccaaagctgatccccaccgccagaactgtaaccgtaaagaatgctgggtacaacatgggaaaggtgaatttccaaaaccttgtccaaggactcgcaccatcgattgccgctgcttcatacacttctttgttgatattccctaagcccgaaattaggatcagcgcatagtagccagacatcttccaagcgatcatcagagaaacgatgatgatggctgcatggggattacctagccaatcaatatcccagcctagtctcgttcgcaagaaggtattaaagggaccgttgtaggaaagcaatcctttgacgatcaaagaagtgacaaccccgcttgacaggtaaggcaagaagaaagccaccatgtataaccccttcagctttggcaggctgttgactaatagcgcaatcaccatcgaaagaaccagcgccattggtacaaagataatcagaaatttatatgtaacgacgaatgcagattggatcgctggactttttatcgcatcaataaaattctgaaatccaacaaattcaacggtcggtgaaatcatattccaactcgttaatgctagccaaaatgaccaaaataaaggaagtagaaagaaaatcaatgtaaaaatcagataggggctggtaaatgaccagcccaattttgtgttcttactcattattgtagcgccccttcgacagctgtcttcgcatcgctcacagctgttttcgcatctttttcaccccgaacaactggcacccatgcttgttcgccaaatacttgctgaatgtcattgtatttctcgttgtccattgctggaaccgcatacggtacattctctgcgtagactttcatcgctggattttcttcaaagtaggctttgaaagcatcgttttctgttgcatcatcgcgcgctggaataagcgaagtcatttctagtaatttcatgtcgttgttttcatcagaataaacaaattccaagaatttcatcgctgccgcttgttcttcttctgttgcttgggcgtacatcacgattcctttagcatctgcataggtggatacttgttctgcatccgctaaagcatcaggtaccacaggcgtagtaaccgtgtagttttcaccaaacttcagctctgggtatttttcttcccagttagggaacgtccaaggacccaaatcggtcataatactatcgccgttttcaaagggatccgttgcttcaccggtgcgcagtacttttgcatccgctaatgtatgcatcaaaccaaatacatctgtcatggctgcttcattagctgtgaattgattgttttcgacaaagctcgcaccttcactggccgcattgtagagtgggaagaaatcaaaccaacgcatccaagccgttggatctgctaagtcttttttcgcccaaagtgctttgtccgttcctttgattttgtcgacgactttcaataaatctgaataggttcttggcacttcatcaaagcctaattctttcaaactatctaatcgccagccaaacaaaatcggattggaataaacaggtagcacgtattgactaccatcagagaatttccaactatcgatggtttgactcatattacgagctttgacgatcgtatcgaaagaatcttgtttttctaatggtaaaatagcctgactagcagccaactgggcagcaaaactacgattgatgttttcagataatgttggtgcggtgttagaagcaatcgcactttggattgttgcttcagaagatggactttccttcatttgagaaacttcaactgtaatgtcttcattttgtttctcaaagtctgcggccatttcttgccaatacttcaattgtgttggattgggtgcagcccaaaaagtaatctttgtcttcccatccgttgccccagaaccgctctcttttgattgattgctacaaccagtgaataaaactgtcactgccactaccgcagcaataccaaaaagcatttttttcattttcatgatcgttcctcctaaatagtaagcgatttctttttacaccgtcatcataccacccgtcattttaattgtcaacattacgtaattataattacaacattacttttgtaattgttttaggctattaattttgtaacattatggtataatcaatataagactaggagaaataaggtgaaaatatgaaaaaagcctctatgcaagatattgccgatgcattgggcatctcaaaaaattctgtctcacaggcgttgagaaataagcctggtgtcagtcaacaaaccaaattactcgttaaaaacaaagcagatgaattaggctatcgttatcaaacgatgaatgaagataccacgatgtcattcttattgatggcaaccgaatttgctttttctcaaacgagtttttttggcgaaatcgttaaaagtgcagaagtagaagctcaaaaaacagcgatcaaacttgatacttataccattacagaggaagacttacttagcctaaagcttccgccaaacttaaaaaagtatgacggtatcctgatcctgtctcatagtaaaaatgcctacatcaagaaagtaattgatactgggcttcctgtcacattgatcgatcaccatgatccttcactcacagcagatgccatcttgacaaaaaacaccgacggaacgttccaagccatctcacttctgattgaaaatggaatgaagcgaattggctttattggtgatacagcattttctcccagctatcttgagcgttatcgcgggtatcaacgggctttacgagaacacaatctaacacatgatcctacgattgaaatcacagaaattgaagaatctcaaggtgctttatttaacagcttaaagaatataaaacaaatgccagatgcatggttttgcgtgaattctgggctagctttcatgttaaacagttatcttcaatcttctggttacacgatccccaaagatatcagtgtgatttgttttgatgaaactgaatttacacgcatggcgattcctcaattgacaaatatcgctaccgatctgcagtttatgggccagttggcgattcgaacattggtccatcgaatcgcccatccccaagagccaatcgtccatcagcaaatcgttccgcagctgaacatccgagaatctgttcgacttattaaagcaaattaaaacaaagcgctaaattctcccacaaggtagaatttagcgctttgtttttgttgaatctattgtactggttacttccccctaagcgaagcaggcgaatctccaagagaaacgagagtcattggatcaagcagcaaaccagaaaagaaggcgaattaattcttgattgctttaagagatttccctctaattttccaaaaagaataacctgcaatcacgacggcaattccggcaaggatccacggaccggtgcttcctcctgtgactgtgatggtttgttcccctagattggcgttgctataagtgatcgtttgactgctggttgcttctgcttccgcatctgtcaaaaaaatggcattgctgtattgctttgaaccggcttttttgatgattccgccataattgatctctttgactttaggatatgcttcgataaatcgccgcgtctcatgggtattcccaaaaatgatcatgatgttttcggcgagttgttcgatcttaggcattttagcaattagttgatccgttgctaaaatcgtcagcttgatacccgccggtttggaaagattcaacgacatcttcttgaattcatcattggcagcttcatcgtttgcgacaataatgcggttgatattaaaaaacttactccaagaaaaaacaacctgaccatgtaacaaacgatggtcgatccgtactaatttgatcataattcatcctcctctgctgttgcttcgactagtaatttcttgcaatttacaatagattgctgactttcctgaataatagctgctaattcttcttgcgagactcggttgacttgtgtcgcaagcgtgatcaccaatggaagattcattccagcgatcagttccaaatcggggtgctcttgaacgaccctcagcaggtcgttgttgacactccctccaagaatatctgtaagaatatacgtgtctgccaagtctactttggctaatatattctgaatttgctctgtcatcggttgatcttcgtctcgaaaagcagataatgcataaatgttcgaatgatctcctataatcattgcagcagtctgttttaatccttgagataactctccatagcttgctagaatgattgttgccatatcattaaccctcctgtctgtttacacctttctataagcaaaaggcgtgccaacttcataaatcgctgtcatagcaaggattctatcagcattcaacactgggaaaaagcgtgctgagagagtgttgggggggagtgttggagggcagtattggagagaacattagaaggaagtcttagtttattgcaactcttggtgtaacgacttgctgccaaaccaaccgctgataaactgataaaccaaaaaagcgtctagacaagcaaatcattgcctaggcgcttttcttaaaagataaatgttgtatcactgtccatcaaacagaacacttctttacgggtatatgcttgcggtttgctgcatgataatcactgaaaactttcttcgatctcatttagatgaaaacaagcaacttccgccgccccttgttggatcaatcggggtttttgcatgtggcatttttctgtcgcgtagatgcagcgaggatgaaaaatgcagccagttggtaattgcttgatgtcaggaatatccatacctttcaaaggcaaatctgggacagtgtattgccggttagcgactccttgcgggacggctgctactaatgcccgaaaatatggatgattcggatgattggtggcttgtcgaatatcaccgacttccatcacttctcctaaatacatgactaagagtttcccatgatctgaaatataacgggcagtggcaagatcgtgcgtaatataaacaaaagaaattccatacttctgattcattctccgcaacaacttcaacaaggagatccttagagacacgtctaccattgaaacaggttcatctgccacgatcaattctggttctacagataatgcccgtgcaatcagtacacgttgccgttgtccgccgcttaactgatgcgggtatttatcaatgaactgttctgtaggaaataacccgacatcggctaatagcccatgcactttccttcgcgcttcattctgatccttagcgaatccatgctttcgcatcgctgcttgcagtgaatggaaaatcgttttgtaagggttgagtgccgcaaaggaatcttgctggatcatttgcactttgaggcgatacgcctgatattctttctttgtcatcgtgcgcaagtcttgacctttataaagtacctttcccgctgtaggttgatggagatccgtgatcagctttcctaatgtcgtcttgccacagccgctttctcctactaatgccaagctttctcctggagcaagcgacaaatcgattcctcggagaatcgctggctcatttggcgaaaaagctttgtggacagctactaattcaagtaatggactcatggtcttcctcctgtacctgtttgaagtggatacatcgcgcagcttgttgtttactgacaggaaaaagcatatggcaagtctcctcgctgccatcacaagcaatgcgcacagcgaaagggcatcgttctttaaagcggcaggtcgcgtccgctttagctaaatcaaaagccactccttgaatcgatgaacgtgtatcaatagcatccgtcaagctaggaattgccgccaataacgctttggtatatgggtgggcaggatgcgtcatgacggcactcacctcgcctacttctaccagttgtccagcatacatcacagcaatacggtctaccattgaactaacaattgatagatcatgggtaagaaaaacaatcgtaattcctttctcttgattgattttccgcaaaatagccagaatatgccattgagtaatcacgtccaacgctgtcgtaggttcatcaagaataatcacctgcgggtcaagcagcaaacttaatgcaatcagcactcgctgcttcatcccgccgcttaattcaaagggatacatttttctgactccttgatctaatcgcacatattgcagcaaatcattgattttggcatccagtagagcatcgcccgttttttgatgggctactgctgtttcatagaaatgttcctctactgttaagatcggattcaacgcactttgtgccgcctggaaaaccgttgcgatctcccgccagcggtaacgattcccttcctgtgaaggcaaggaaagaaagtcaactgcctccccagattgccaataatatacttgtccagccagtatttctcctggctcatcaatcaagtttaaaaggccaaaagccaatgtggactttccgctgccgctctcaccaatgattcccagaatctctcctttttcaatcgttaacgatactcgatccactgcattgatcgttccacgatccatctgcttcaaaagcatctctgaagcttctgatccccctcgttctccatgcgcgtttgaacctgctggctttagttgattctttcgtgacggcttgtcaggattccgactgattcgccattttgatctacttttcgaagttgcgtgacgacgaaaccctatagttagctggtctgcttcaagtatcttacccatcgatctcactcctaatccttggattaaaggcatcttctaatccttttgaaaaaagaaagcaggccgactggaaaacaacgatgccaacaatcggtgtaatcaaataaatagcagctgaggatccaaacatggcaccggttttggtcattgccaaattcagcatgattccccaatgctcccctttaaaaggtgccaatccaagcaacatcaagccgacagaagcaagaaccgatgcccgcatgatcaagacaaaattgattgcaatataagggatcagactaggtaaaatatcttgccgaatcatatatcccttagacattcccaaaagccggctagccagaatgtactcacttccccgcaatgtcatgacctgactccgaacgctgcgagctaaccctgcccagttccaaatcgccaaaagaaaaccaaaagccagaacatttcctgcactgatcaccaaagaaagtgccataagtacgggaaaagaaggaatcgtcaaaacaacattcgtgaggaacatcaagagtttatctgttgctcctcccacaaatcccgcaacaatgccaatcgacatcccaatcaaaatcgagaaaaaacctgaaaataaggcaattaggacgacatccctcgttcctaaaataaactgcagcaatgtatctctaccagtaaaatcggttcctaaaggatgttgcaaagaaggacctaataatcgattggtataatctgcgggcaagtcgccaatcagccattgcccaaaaagagcgaaaccaactaaaatcagtaataaatacattccaacagccgcttgacgatttgcacgaatcactttgataaaagaagacaattgtttcattctgtctgcctccttaatcgaggatccaaatagccatatagtgtatctacaatgacattggcaccaactactgtgacaatgatcataaagaacatcccttgcatcaaaggaatatcacgcaccgcaatagctgtgttcaagtaatagcccaatcctggataagaaaagatgttctcaatcaaaggcgcaccgcccaataaaagaccaaaagtcgttcctaatgtagtaatcatgggtaagcgagcattctttccgacatatttcttgcggatcacaccatcactcaacccacgcgcacgtgcatacttgatgtattcttggtgcataacattcatagcacttccccgcatattcagaatccagttcgccaaataaacaacaaaaatggcgctgataggcaatatcccatgacgtgccacactaatgagaaacggaaggttcaaaccaaccatcacttgtgatccataggcaccgcggcttggcagccagacaagctgcacggcaaacaaagagaccaagaagaaaccaatgaggtaatccggaaacgagccaaccatggaggtcagtgtttctgtcaccgtatttaagcgtttatttttgcaccatgcaaccatcaaaccgattcgtgtacccgccatgtaagaaagaatagtcgccacgccagctgaaaaaagcgtccaaggcaatgcacttaaaacaatggataaaacaggcgtccgaaaacgaatcgaagtgcctagatctccttttaagagctgcagaatgaaatggccgatctgctgcagcaatggctgagatggatcataattcagcatactgatcgctcggctcatagcatccgcttctgagattccttgcgtacttcgcagctcatttgccaaaatcgttactggatcgccaggcatgattttgataatcaaaaaagtcataaagacgcctgcggttatcgtaaagaaaacattcgctaatttcttcatttcttatacacgcctccttccagtctatttgtttaatcagtgattcccatgctcttttgcaacgttccttccgcaatcaatgaagaaaacatcgattcgccgacgccaataaagcgtgggtcttgaaccaattggtttgcaggaacttgaaagtcaatagccggattaagaacccgcactggaaagcctttttctagataagggatgaacaagatatgctcatttgtcactgccatcaactctttagtggccgcaataaaatcgtctccctcactgtcaaacagatgattcgttaaagcgatcacatcaactttcccttgagcgttggtcaaatataattctcctgttggctccgtttcaagtccgaatagccaactgcggcccttatataattgttcatacgtcccataaggattggcataaagaatattagaaggcggggcaaattcgatagcaacggtgtgctctccatttctcaaatacgcatcataagaagcgccttccattggcagaaatgtcacatcaaagccaaaactattcaattcattaacgatcgcttctcccggcaataaagctgaaccccagccattattgcaagcaaaatcaaaggccactttatttccttgcgcatcgatccaggtatcttcttttgtccaaccagctgctaataagacggcttccgcttgctcaacattgtattctcgtgcggtgagctccgactgcacccaatctgtcaatccataaacttcttgtaaggaaagcggcaatcctgtactccccgtctcacttggcatactgccgacttctgctaacggaagaatttcatcaggattcaccaaataggccacagcttcgcggaaagccagctcctgggcaaaagcctgctttacattgaaaactacggacatttgtgaatactctggtaaataaaattcagtaaaatggtccaacttactttcaacttggcgaatcaaatcttctgtcataccgccactgtgcatatcgagagtcccatcgatcatactgttggcagctacttcaggtgtgacagcgcgaataatcgttaatgaatcgatgccagtctcttgataaaaatgttcattcttctccaagactgcttcactggtagaaagagcagcaatcgtaaatgcgcccgaaccaaccatatctgtcacttgcggcatatatccttccaattcttcattaaggatttgtaattgttcatttcctgcttctgaataccaatacgtattggtctcatcatgccattcccgctctgcatcagcgatgccttgatattgctgtgcccaatcaccgtattcctcgaaacgagcagctacctttacatcagtcagtagattcagcatcaagtgactttcatttttgaaataaaacgccactgtttgctcatccgggacttcaattttctctaaaaattcccaaatctgtttcttaccgacccacatttggtagctggtgaggacatcttgagcagtgatgtcgctgccatcactccatttgataccttccttcagtgtgatattgatcacattttgatcaatgctgtaactcgaagctagcctaggcttgaaattctcgccgccttcacctactggggtgaatgaaaacaacgcttcttgcacataaggttcaatcccaccaccaataaaaccactaatatagggattgccatgggcagttggcggaacaacataatcgccattgatcactaatgtttgagagtcctgcgctgtttgatcggtctcctttgtttcttctccacaggccgttaagagaaagaatgcacccaagcaaaccagccctttgaattttttcatgtgttcactcctcagctaatatgatccctgttgatccgataacgattgacggattgtctccaatgactatcggatcaaccataggtgaatagaaaccaaggcttgccaacttctggacctaggatagaaggattgttcacccgacgaatgtaacgacttactattcgttcagctatgactacctatttatcagtaagcattatcattacgaggcttttatgcctgccatttgtcaaaaaacgattctgcgcatgaatgtttagacaacaaaaaaaggcatcggacaagactgtccaatgcctttgacatagcaaaataagcgtctagcatcccgcgaaaatttaccaaaaaaacaccccgctactagaaatgaagggaaattttgggtacaataaacacgttgatgccgatggcgttcaactatggcaacttgattggtcatcttggttaaaggtctgactgatcagggcctcgccgctctgcgccaacagagttgcgaggtgcctatttttttggtttctattcggttataagtgtagccgattttggaaggggttgcaagcgaacatcagaggaaaaacgaacaaaacattcaaaatatggcagtattttattgagatatggagattatccttgatatttctattgttttaacaagaatcaaacggatgtacaggacttgctgctcttcttttaagaacacataccacagggcagttactggtctttgttttgttccttctttcgcagtgcttcgtctaataagtaaatcacagtcaaatatttatccttctctttattaaaaggaatacgcaagtaatacccagcaatgagaaccaacaacaaaaacacaggtaatgtgaattctggactttttatttcgaatgtcaaagccaacatagctaagataatcgataacgcagacatcgagtaagacattttgtcatatgatgtaagcagctctttttctgtattagaaaaacgtgtgctccaaaatcgcaaaataaacgcatcttcttccgcaaccctatcaatcagttctactaattctgcttttgtgcgcacttgttttacatgcgtgtataagatatctttcaccacgccgctttgatccttttttgtatagaaatcaaataaaatttctgataaacaatactgagcattgttctttggtctaaacttctttaacatctacttcctcctttggtattataatcgcagcacatcataaatatttaatatcaaactatataattttatcaaaaagttaaactaatttttcattgtctgcaactctatttcattggatttaccgacctaaataatactatgaaaatgttactcctagtatgactctctacacaaaaagagaccaagaatccttccgattctggtctcttacgtcaaaactaatactcacaactcccggtatttctttttggagtccttactttgttccaccggatatttcaccgcatttttctgcagtttctctttgatgatctcatcaacatccagctttagattatccgccagcatataaatgttttcattcctacacttcctccccaacaagcgtcaagaaagcctcttcgagattcttcttattcacttttaatagaatatcagctaccgtcccgctggcaacttctttgcctttgtttaacacgagaatccgatcacacagcgtttccacttcatccatgtaatgagaggtcagaaagatagtgacccccttgtctttcaaagcgagcaagtatcgccaaacctcgcgcctggcctgggggtccagtccggttgtcaattcatccaaaaaaatgatttgcggattccccatgatagccaaaaggatacatagcttctgtttctcgccccccgataatgttccgagaaatgaattcaatttagaggcaagaccaaattcatggagcgcctgcatccagtttagcgggttttcgtacaacgaatgggtgatctcgcaaatctctcttacctttaattgattttgaaaggcagattcttggaattggacccctacatactgaaacagtcgtttccgttcagccttaggatctcttcccaaaagcgagatccttgccgaatcacatttttgtgtgcccaaaatacaatcgatcgtcgtggatttccctgccccgttatgtcctaacaaaccaaagatggtgcccctttcgactgtgaaactaagatcatcaatcactcgtttctccccaaatgttttgctcaatccatgaacctgtatcgctgcttgtttgctcatacattccctcccatctgatctggactcagtttagccgaaaatcaaacaatgatgggatagtggagggaatagaaatttttttctaaacaagtttgcaaattcctaaacatgttcagaacaaagggaaaacacttacatttcaaaagagattctttatactagtttttgaagaaacagtggccacatcgttcttctattcaaaaatagccttcagtgctgcacttagcaaaagctcaaattggttcagtgttgtgccaaagaaaagattcggttggtaatcggagattctttggggagtatatgtttctgtgctaatggtcagtgtggctaggctgccgatttttgaatttttttgaccaacaaaagcaatcacatcgatatggtggtcgttagccattttcgctagctcagctaaccgaactgtatccccagaattagaaataataacgagcagaatatcttgctgcacttgctgtctaagaaattccagatggctattggcagttgcacgaaagccatataaattaagagattccgaaaaataattggcgagattctgagagaaaccggagccaaggatcatgatgcgcttgtcgcgatactcagagagtaaatcgataaatgccgccttttcctcattggagaaagtgcttggcatcgcaatgtccgattggctgttacctagtgcaaaaaccaactcgctataaccggaatagccaattttcttggccatattgatgattgttgctgtagagacataggttgctttagccacatcacgaatcccgattgtttttaatgactgccgattttttttcataaaacgcaagacttctgcttctgaatcattcagttggtatttatctataagcatttcaacatccataagatccacctcaaattttatcaattaggagtattatatcatgacagaaacgaaatttattcaagatccctgggcaaaaatgacgacccgcaacggtttacgcggagatgaagttatctcggcattgcaaaagtcgatccgtcgaggcaaagaaaaagaagcatgtgaatttgcctatgaaatgtatatcacctcgccgcaatttgaagaaaaactctggagaagattactagcgatcagtgttgaagatgtaggtatgggaaatccaatggctgccattatgatcaataacttaaacacgatgcgcaaggaattccaatacaacgaatccgatcgggcaatgtatttcttccatgcgattcgttacttatgtcagtcggaaaaagaccgctcatcagacttactcaagaatattgtgatcaagagtttcgcgatgggctatgttccagaaattcctgatattgccttggataaacatactgtccgcgggcaggaaatgggtcgtggttccgaacacttcttacatgaagccagcaaagtaatcccacaagcaaaagtcactaatgactacaaagaacaatacgaaaaaatcatcgagaactatgatccagatcacgttgtgccaagcgcgttttcattcaatccttggcaagtataggaggaagttacatggaaaactctgcatttatcatgaagctgaatgacgtcctaagccccatcgcagcaaaaatcggcaatcagcgccacttaaaagctatatccagcggtatgatgtttggactaccctttattgttatcggttctttttttctaatctttgccaacccacccatcaacatggatcagtaccatcctgaaacagccaatatctttatgacatttatggctggctggaaagatttcgctgtagcaaattatgatctcatcaccgcgccttatcaattgacgatgggcatcattggttttatcagcgtctttgggattgccttctctcttgcaaatgaatacaaaatcaacccttccatgaatggtatggttgcatccgtcatttttctaatggtttgtacaccagtgaaagaaggcgcgatcagcctcaattttctaggaacgaacggactcttcgtcgcaatcatcatcggcttgttagtggtagaaatcaatcgtttgtttgaagtgaaacagatcaaattgaaactgccaggtaccgttccacccatggtggcaaccttcatcaatatgctcgttccgctgttgacaaatatcatcatcttctatgggatcaatttgatcttcttggcagcaacaaacaaaatctttcctgaagcagtgatggaagttctgactcctgcaacgaacatcgctggcagtctcggcggtttcttgttgatcgtgactttgggcaatatcttatggctgtttggcatcaacggttcttcaatcatctttcccatcgtctttacactgggaatggctcaaactggcttgaatgccgagcaaatggcaaatggcgaaaccatgacacacttaatgaacttacaaatgtttcggatttcagtccttggcggagctggtggtactttgggattggttttattgatgatgcgaagcaaagttcccgaatatcgcaccatcggaaaattgtccttgattcctggaatctgctccatcaacgaaccagtgatctttggcttgccaatcgtttttaatcccattctagcaatcccatttttggtcactccgatcatttcgttattgctgacctactttgctcagagtcttggatggatcggtattggctttatcgttgatccttccttcacaccgttttttgcacaagcttatctttcaagtatggactggcgcaacattctcttttgcctactgttgatcgtcatcagtatcttcatatactatccattctttaaagtaatggagaacaataagacaaaattagtcgatcaaaatctataaccattcttcgtaacaaaaactagaacagctaaatgattttgctttatactaaaaaaaagacaaatcctttcccattcatcgaatcaactcgattcgaatcagaaaaggatttgtcttttttggttaaaactccttcatttaaaagacctgaaaagtcagcacaggtttaggcataatgaaagatttcaaagcggaggccttctggcgtctcaaagaatagtgcataatacttaggcgcgatccgttctttgtattccattggtttcccatgaagaatctttactcctagtgctttgatttttggatagatcgcgtctacggcttccctgctttctgctttaaaagcaatgtgttggagggaaccaggctttctagaatcaattgtctcattgatccattcttgctttggcgaacagatcccaaaatcaaaggtatcactcaaatactctactacttccatgtcggcatgttcgagatagcctgaatatttcttttgaacatcaaaacctaacaaatggaacaattgatcataaaagggttccgctttttttcatcgttgacagtaatttgaatgtggtggatttgatacatcagtggctctcctttcgttataaaccaaaacagttaacagttctcgatagcaaagggtgggtactgaatcgctcttgtcgccaagtgaatgagtttttcctgattgtcgtcagccgcaattcgattcgtctttagagtaccacaatttcggcaacggtgaatgattgcccattcgccatcctccttggaccaaatactgataggatccatcttccctcggcacaaagaagctcggtctccgggaagagtatccgcatgaagactcgttaaacagtggggacagtggttgcgatgctgactacctgcattttcaggatttaccggtcgaccgcattcttcacagataaaactgtcaaaacaattgaaagtaactctaacaatttttaaattgttctatcagtttccttgaaggtggtttacgatcaattttctacatacttagtttatttagtataagaaagtttaaactttacatatatttttcttgtataaggattagttcttcttgtctatgataaaatttattaaacagtttgaaagtaaaaactattcaaagaaagtgggcgataacaatgggattttggtattttttaacgttagctgtcggtataactttgttgatcataagtgtttcaaataaagaagtatctagatcaaccaaattcgtagtagcctgttttgttttagggatcttgttagtcataggtagtctacttttatttttaccaggcagctcttcgattattgagcaactacttcaactaaattagcttcgttattaaaagccgactttctaaaaaaagaaaatcggtttttatttgtactggtcgaaaaaaatttttctacggctggttttgactttattttagatccagctgaacgatcaacggctccccttcttgcattgcttcatccaacattaaagaataaacatcggcatcctctttcgtgatacgtaactgttgcgcactcatttcgccagcacccacttcttgaatacgcatcatttggttctctggatccacgctaagtcctccattctttggtttggcgaattagcggtaaaaaaacgtatctggggtttgaagttaggattcaaaaaaatataagaaaagccccatttaaggggctttccatttaaggggcttttttatctataaaataaagttcagaaaagtctctatcgtgccactttcatacatgatgtatagtccaagtggaatgaatactaagggcacaatgattcgctcgtatttttcaattgtctcggatattaacggaatagaggatagcacccgactaagctcgcaaaagataattatgccgattgcaaacacaagcaacgccacgagggtctgtgaccaatctaacgaagcaaaataaggtatatagatacctaaattatctccgccagacgcaattgtcagcaatgtaactgtccaaaacagttgatttgccttgctttgttctaatctttcaataatttcttcctcttcttcttcctcaccttctccaacaattgcaaagcgaatccctaaatagatagggattaaaccaagcaatccaaccatccatgcttcaggcacgaaattgacgacataagcagcaactaaactcgcccctacaagtaagcctgtgcctagatattgccccgcataaatatgccatttctgtttattctgtgatagctgtgcaaataaaataatcaatataattaaataatcgatactggtggaaatataaacaccgatagcagatatgattgtctgtcccataaaaaaacctcctgtattagtcagtaataaatcagcagattttaggggagcacagacacattaatttagctatcgctagtgggtaatatcgaacgtaggaaagcattttactcctcctcaaaacgtagttacaaagtagtttctaactggaattcggtgactacttgtttgactttcgaatataagcctgcatattttgccaattttgtttgattttccaatcgttcaatttgaccgatttcaacgattaattaagtggagtacacctttccaatacctggaacaccgggcaaatattgatattctcgaatgccgacaaataattgcttgattgcttttccaagtctttgatgttcttttcaagcgcacgaatttcacgtacaagaacacttagaacgacattgctggattcttgtgcaagtctacctaaccgataactcatggtaattgcacgttgaatgatttggcaattttttctggatctttaaagtaaccttttccttcttcttgtattaagtcacagaacgcctctaaggcttctttagctatagtcgctgcatccgcaatatttccatagttactgcaattccttttacggtatcttcacccatgacaaccattctaaaaattttcgctaactcgtccattccagctggaaaagaatcccaaaaatcaatatcataattaccattttaggcttctaaaacaaaactacaccaagaaaggatatcaccatggatcattgtactaaaaaattgggttctatgataaatagtgttggtgaccaatactatttgacacagaaccatttaacttaacttgatgcaaataataacttatctaaatcaaatatctcaacatatttttgagtatgctgtttaattaaacctctctcttccaatgatgagaacttacgacttattgtttctggggttgtacccaagtacgaggctagatcttttttcgacattggtaaagtcacataagtatggttttcttcatcttcaacgtattctgatagaaaatcaataatacgagactctacttgctccataccaacttgcatcgtttgcttttctgatacctgtaaacgtttcgtaacatctgatagtattcttctcataatttctgggtaagcgcctaaatagtcatccatatcctttttatgaattctacatatgctcacttctgatattgcttcagcataattagaatggtaactttcagtttgaaaaatagccacttctcccataaaatcaccaggatttaatatgcgtacagtttgttcacgaccagattcatttaagttataaacacgtacacgcccattatttataatataaagtgtgtcatctttatcaccatttccaaataacaacgcattctttgcataatgtacttcttgcgctgattgcgcaattaaactcatttgttcttcatttaggtgattaaaaattggaactaaacgtatacaatctatatgactatggtggtgatggtgtgccatacaactttcctcctaattaatcgttatctatatagtcatcatcttctaacgcatccttgttaacaaaggcttgaagttgccaaatatttatatctaagtaatctttataactaattagtaaatcttctaatgcatcatctgcttcttcttgtgctaaacgcattgcacgaacggtgaattcacgattagtcctaaaatcttctactaactgtatgaccatttcttcagcagaataatatttttcagacggatcttcagaaattattgtaaattcctgaaattcagtagttgttgaagctggcttaaatcctgaagctagtaaacgttctgcaatcttatcaaaccatgtctcattctcattgtataaattctcaaaaacactatgcaatgaatagaaatttgtgccttttacataccaatgatattgatgtaattttacatgtaaggtatggatattagcaagtatatgatctgtgacagctacagcattaatcttagtatgatgaatgtgttctttatatgctttttcagcagctaatttttcttgtctttcatttgctgttgtcattttatacaccttcctttacttttgaactaataactgaatatcctaggttttcaatagctctttcaattgtactcaaattgacttgttcttcatcaaaatctacttttaccttacttgcattgaacagtatttttacagaatctttttctacaccagctgtctgttttaaaccactttcaattttttgtaaacatgatggacaagttaatgtttctaattttaatgttgctttagtcatatctatcactcctttaaataaattgtacaggacatttcttttaagataattgacatagatcaattatcttaattgatatcttcttaatctcattgcatttaaaataactactaaaatacttgcctcatgaactaacatacctatcgacatagacatccattcactaaatattaaactaaccaataatattatcaccacaccaacagcaattagaatattttgtctcatattcgcatatgtccctttagctaaacctaaagcatgggggagacgattaaaattggaattcattagaacaatatctgaactttcaatagccacatctgtcccatttcccatagcaatccctacttctgcagtagctagagaagggctatcgttcacaccatcaccaataaaagcaataatttcaccagtagactgtctttcttttagaaacgcttgcttgtcctcaggtaacatatcgccatgagcctcggttaatcctagctcctttttaactaaattaactgtgccttgattatcccctgataatacagtgagatttttaacaccaagtgattttaatttttgtaggtcttgtttaacacctgctcgaacttggtcacggattcccattaaaataattaacttacgatcaactgtcgttaatacaatactcttcttttttttcaagaactcaaaaaagcggaaaatcccagatttaaaaatctgagtttccgcttttgtcatttcaaggatggactattgtctcagcctcttctaatttattcttaagatatttttactttctctgcaggtgctgatacttctttttgttcttttcgacctttcaacttatacttcattaatctcatgccattgaaaattaccaccaagatactaccttcatgaaccaacattccgatagacatattcatccattcgctgaagaagacgctggtcaacaagaccaacactactccaattgaaatcacgatattttgcttcatattatttgcggtggcttttactaatcctaatgcgtgaggcaagttgctgaagttcgagttcattaaaacgacatcggatgtttcaatcgctacgtccgttccgcttcccattgcgattccaatgtctgctaaagctaaggacggactatcgttaacgccatctccaacaaaggctacaatttgaccacgttgttgaagttttccgatataagccgatttgtcttccggcaacatgtggccgtgagcttcggtcaaaccaagttcgccggcgaccacatcaacggttccttggttatctcctgaaagaacgactagatttttcacgcccaagtcttttaattcctgcaaattagctttcacacccggacggacttgatcgcgaatgcccatcagtacttttaattcaccgtcgaccgctgtcaaaacgagagagttcccttgttgttcaaaccgtttgacatctttttgcacttttttgctgagagtgacattttctttttccatcaaggccacattcccaacagccactctatgtccagctacacttgaaacgattccgccgcctttcacgacttcagttccttcaacaggataaaaatttgtttctccaatttgatttaagaccgcttttgctaatggatgatctgattcccgttccacactggccagatagccaagcgtttcagcagaatctttttcatacagttcagtcgctgcaacggttgggtttccgacagttaaagtacctgtcttatcaaatacaattgtatccacattgctgaagtcttgaatgacttcactcccttttaaaagaacaccgttacgagcaccattcccgataccggcaacgtttgagacaggcactccgataactaatgcgcctgggcaacctagaaccaagatggtgattgctaactcaatattttgactgaacgcccatacaacaattgccagaaccaagacagctggtgtgtagtatttagaaaagcgatcaatgaaccgttccgcttcggatttagaatcttgtgcttcttccacgagttcaataatttttccaaatgtggtgtcctcaccaactcggtcagctctgatttgaatcgttccgttttctaaaatggttcctgcaaaaacttctgcatcagctagcttgttgaccggaacagcttcccctgtaatgctagcttcattgatatgcccttcgcccgtaaggactgtgccatccactggaactttcgcacccgttttaacgagcaagatatccccttcatctacatcatccacttctacttcttcaaattcgccattatccatttgtttcaaggcgctttcgggtgccatttcagtcaattctttgatagcagatcgcgtttggttcaatgttcgttgttccaagtagtgtccgaataagaataagaacgtgacaatagccgattcttcataattttgaataaaaagcgcaccaatcgctgcaatactgactaagacatcaatactgatgactttgactttcattgcttgaaacgcttgaatggcaattggcgtaatcccaaagacagaggcgatgatcaaagaccactctgaaagtcctacgttttctaaaacaaagtgactgaagaaaccgagtgcgattaacaatccactgatgacggtgataacatttttcttgcttaatatatattgttgcatgctttttccctccaaatttaatttctcttttattgataaacacagtataagataattgcctaagtaattaattgactgacatcaagttttgaaaaaatacgtgtcccttctcactatttttttgatctaacagcctcaatgacacttattcctctttacagttataacgataccctctttttatcgaataaaaatttacggctatcaagtttagaaagttctcttttatcgtttctaagcacctcgaatcggattgcaacaaaaaagcaatcccggaaaaatagcttttcttccagaattgcctagttcatttaatctgttaagcggccttgacttttgctttaaggaccggatagcctacgttttcgatagctttttgaatctcttcaatcgaagtgacagctgaatcaaaattggttttgactttgctggagttgaataatactttaatgctgtctttatcaataccgttaactgatttcaaggcaccttcaattttttgcatacaacttggacaagacaacgtttctaattgcaatatagctttttccataattcctatctcctttatgtgtttttattttatccgcagcagattaatgaacactgccttttcctctttacaactgtagtatagctcacttttagcaaacgaaaattgacgcatatcaagttttgcacttctttttatctttttgctcaattcaccatcttaatagtctttttctgccccttattgccatcagaataataataaattggtggatagtcttgtctgcgtataaaccatactacaatcgcgccaataaacagggccagagacaaggcttgcgaaacgcggatccactcgccaatccataaactgtccgttcgcataccttcaatgaagaaccgacccactgagtaccacaaaacgtaactcaaagcgacttctccttgacgcaaaagctgttttcggttccgtatagtgacgatgaggacaaagcccaacaaactccacaatgactcgtataaaaaagtcggatggtagtaggtaccattgatattcatttgttcaatgataaattcaggtaaataaagattttccaagaattgacgagtaaccggtccaccatgagcttcctgattcataaaattgccccaacgaccaatggactgggctaacaatacattgggcgctaaaatatcaagaacgagtgccaaagaagtaccttttttctttgcataccaatatagcgtaccccctcctgcaatcaatcccccataaatcgcaatgccgccattccaaatcgcaaggatttgtcctggattttgcagataataaccacgttcaaataacacataataaagccgagcgccgaggagtccaatcggaattgcccataaggccatatcgataatggtatcctcttccagtccttttttctttgcttccttggtgctcaactggagagccgctaatatgcccgctgcaataatgactccataccaatgaatcacaacagaaccaatctccaccgcatggggattcaaaacgcctaatacgaattccattctatttgctccatttcttcaatttttcgcgtcattctagtcatggtgatgctgaacaagattccggctaagctccatggaaaccaaacagtaaatacacttttatctccctggtcactcgcttcgtaatacgccacttttccgtgtccgattacgccggctccttttacaacttcctcttctttttccatagctaacctatctgcctcaacaacgttagacgtttttgcttcgccgccaatcgtgttcttggtgaaagggacgacaaagaatgcacccgctgctgacaacgtgatggcaactatcacccaaaaataatgcacattcacccctacttatttttacgttttgttcgacaaccctatcttaaagaaaaataaaacaaaaaaacttgagggttatcatgtttgtgcttttatttttccaatgaatgaaggtcgttctgtcttaaaaaagccaaaaacggacagatggaagcaaaagcactgagttctgtcccgttgttaatgaagagcgacagaacaccaacgtgtagaaaaaagtgtgtccgattattcgctgtaaagcaataaatcatctaaatcctgaatcttgatccttttcccagacagctgttgaatcaatccctcgtcctccaattctccaaatttgcgactgatggtctcaggtgtcgttcctaaataggaagcaatgtcctttttttccatcggcagggtgatggtgggagagttgcccatttcaggttccacattttctgccaaaaacaaaactaaacgggtaatgacactctccaaggctacttgtgtcgtttgacgttctgaactttctaaccgtttagacatttccgccaatagttttaaagaaatagctgggtattgttccagaaaatcttggacatctttttgctgaatcatacagacaacggtatctcgggttgcttcggcatattcctcgtgtactgcatccgggttgaacaaggtccattctccggtgaaatcaccagggttcaagatccgcactagctgctctttgccagagtctgccaatcgataaatacggattttcccacgattgataatatataaagtatcctctttttcttgtgaacgaaacagaaactctcctttttgatactgtttcgtgtgggctttttcagcaatgtaattcatcgcgctatcctctaagtgattgaatattggaaccaagcggatacaggctgcgtggtcgccaatttcatgatgggtatgtttagtcaattcattctccccctttatttattttgtttatattcgctgcttttattatataagtctcttactacaaaaaaattgatgcacatcaagaaaatggaaaaaggactggaaagaattccaatccttaaatcagcttctacttttaccttaatcttcatcctcatcaagagcgtcatcatcttctaatgcttctttaccaatgaacgcttgcagcatccaaatgttcttgtctaagtcatttttaaaagcaatcaatgtatcttctaaagcatcgtcaccctcgtcttgagctaaacgaatcgcgcgaatagttaggtcacgagtgcttctgaagtcctcgataatattttcaaccatgtcttctgctttagcgtatttattaactgcatcttccgaaagcatcgaatatttttcaaattcaaccgttgtcgaagcaggtttatgcccagaagtaattagacgctccgcaagtttgtcgaaccatttttcattttcgttatacaactcttcaaatttttcatgcaacgtaaagaaattggctccttttacataccagtgatattggtgcagtttcacatgtaatgtatgcatgttgcctaaaagatgatccgcaatggccgctgcattaattttcgtatgatgaacatgttccttgtgttcttgttcttcttgcaatctttcttggggtgttctttcttgagtagctttattttcagtcatgatttattcctcctataattttggtttgtttaaaatagctttctttgattcctcctttttctttactgaatttagtataggatagatttccgttaaaaaaattgacgctcatcaagaaaagtatttcttaatagacgccaggcttctctattaaattcaactgaaataatcaaaggaatgaagtcgttccctccaaacaaaaatttcattaaagtagggcctaaaaaaagaatagcaactatactttgtcaagagacctgactgctatttttttgcttgttattcttcaattaccaaatgtcttgccttgcagtatatttaatgctctttctcactagtgttgcatgcaacactagtgagaaagagtattaataagattaacctagaagaataactttactttatttatgtcataccataaataaaaattgaaaagaattttttatttatttttagtagatcgattaataggagttttagcttgggagcgtcaataattttgtgtaaatgattcttccctactgcagattgtttctaattctcaatcagttggcttagcatttgttcaagttcgccttcggcctgttgaaagcctttatgactgcgacctaggaatttttggttgtaagtatcaaaagacgagactaagaaacgttccatcgactcttcgttttggaactgttccttgcggtggctgtatttcttgatttgcttattaaaggattcaatcaagttcgtagaataaatactcttgcgtatggccaaggggaaatcatagaaagtgagcaagtgatcgttcgaaagaatcgattcaaccacttttggatagctggttttccttttttccgcaaaagcaccacgtgcttccaacgccacctctttagatgaggcttgatacaccattttaaaatcatcacagacttccttacgatcatcgacacgcactttgtgactgatattacgggaaacgtgtacacaacaatgttgaaaacgagctttgggatagaaccgactaatcgctcctaccatcccctttaagccatccgtgatgaacaggaggacatttttcaaaccgcgctcttgaaggtccaataaaatttcctcccaaatcgtgatggattcagtcggtgcaatcgcatagctcaatacttcctttgatccgtccgggcgaatgccaactgcgatatgaatagcttccttggcaacggttttccgctttaacggaatatacgttgcgtccatataaatagcagcataacggtcatgaagctcccgccctttaaacgccgttacctcttctgtaaatgattttgttatattggacatgttttggggcgtgtagtgatgcccatacattttctcaatcaagtctgcgatttccgacatggtaataccttttcggaagaggtgaatgacggtctcctctaacgtgtcattcgtccgtctataagcaggaacagtctgttgcttgaactcaccattgcggtcgcgcggaatctggagatgaagttccccatactcggtcttgaccgtacggtcataggagccgttacgagaattacccgtgttaaaaccaatgcgatcatacttttcgtaatctaggaaagccgttaactccgttttgagaagcgtattgactgctttctccaaatggacacggaataattcattcaaatcgcctttgttcgctagagtctttagaatttctgtagtaaaatcgttcatagggaagtcctctcttctgtgaatgtgttgtggtaactctattctacagaagggacttccttttttctatttacacaaaatattttacactctcttaactaacacaaaatcatttattgttaactgtccaattgttataaataattttatctatatttactattcctagtagttcttgttttgctttcagaactagtggggacgaattttccggattaattccacttaattccacccatacttccgaatcagagtcatttaaaccatctcctaataaagagggcaataattgtttttttatagttaagtctatttcaacatcataaagtgccataatatgatgaaccataaaaaattttttttcttctttgacaaaaacatcataaattctgggattggtgtatcgcactatactataacctgtttcttctagaatttctcttgtcaaggtttcagttagtccctcaccaatttcttgactgcctccaggaagatcaaatcttcccctgtaaggtccggcattcttctcaatacacaacaatttattatctttaaaacatactccgtaaactccaaaatgactggtgatatccattaatctatctccttaaataatatttcatcagtataaaaactgtctttgaatactccaaatcccatattacttttgccatataaaacttgaatagcctctagcgctttctggttcctctttacaatcaaattggaaatattataaattgttttttcaggctttggtttagatatctgcacaattacaaaatcaacctttatatttttcgcagcattcaatttcatacaagcttcaccagtagtacctgatcctccaaaaatatctaatattttatctccatcccttaaaaaaattgaaaacacttcttctagtagtgtaactggttttggataatttgttacaacttctttgttaaaaagatcgttaatatattttctagcctcattttgatacattgactccaattcataaaattcatcttctctttctgaattagttgaaattgtatcaatccatgttgaaaatttataattgacgttgtattttgggcttttagaataacacaatatatattcatgctctacagaaatattttcttcgtttaactctgaatgatttcttcttctccaaacaaatgaacacacaaatttgtctttaccaaaaattgaatcaagaatttttatcacattgtacaattggttctgttgcaaagttttaaataaagaataaaatcccttacggtatctatgatttaagctgggattcccaataataccttgatttcagtacagaccgaaaacccgaagagagtgccttcttttcgggttttcttatataatcctagaatggcttccatgcctttaatcgtggtagaggcagtgcgtaaacttcgatagaatttattgcgtctctttactggacgatggtcttgttcaatcaaattattcaggtatttaatggtacgatgttctgtcccttgataaaagacgtattcttttagtttcttaaaggcacttgtaatagagggggctttatctgtgactacaaccttcggttcatcaaactgcttcactaaccgcttaagaaaagcataggctgcttgtgtgtcccgttttttacgtaaccaaatatccaaggttaaaccatctgcatcgatggctcgatacaaataatgccattttcctttaattttgatgtacgtttcatccattttccatgaataaaaggattttttatttttctttttccaaatttgatagagtagtttgccatattcttgcacccaacgataaatcgtcgtatgagaaacgttaatgccacgatcatataagatttcttgaacttcacgatagctaaggttataacgaagatagtagcccacggctacaataatcacatcctgctgaaattgctttcctttaaaatgactcatcgtcattcctcctgctatctttttctattattctaccttatctgatagtagatttaaaactttgcaacagaaccgcgaagataataaccgacagccacaataatcacgtcttcttggaattgttttcctttaaaagggttcatatcttcgttcctcccgggtcattttagttagattttacactaaaaggtcttgatcgaaaaactttgcaacagaaccaaaaaggagatctatcaagcaatctccttcccaataaatctcctcttatataaagttatttatgaacactgatttaagctaagctgccgatatcacaatctcatcatccactaaatcagccttcaagtttttgacatctaagtggtcaaggtaaaaatccgttaccttatcacgaatttgttgttcaattactcgccgtaatggccgcgcacccattgcttcatcatagccttgttccatcagccaatctttggccgctttagttacctcaagtttgatggattttttggctaaagttttttgtacatccgccaacatcaactcgacaatttgacttaagtcttgcttagtcagatgtgaaaattccacgattccattaaaacggttcagaaattctgggcggaaaaatggtgctaacttatccattaatgactgatctcgttgcttgtcaccacttaatgcttcattaccatagccagcattagaagtagcaataataatcgtatttttgaaattaatgacattgccttgtccatccgttaagcgcccatcatccatcacttgtaacagtaaagttaatacttgtggatcagccttttcaatttcatctaataatacaatggaatatggattacgccgaacccgttcagttagagtattagcattatcttcatagcctacgtatccagccgaggtaccaattaatttcgacacagctgtacgatcagaatattcactcatatctagccgaataatcgcattttcatttccaaacatatctaaggctaattgcttagctaattcagtctttcctacgccagttgggcccacaaacagaaaacttccaatcggctgattaccctctgaaaagcccgcacggttacgccgaattgcttttgctaccatttcaaccgcttcatcttgaccgattaccttacttttcagacgcttatcaagatttttcaagcgctcaatatcattagcgcccatatcagaaactggtataccagttaaacgttcaaccgattgtgccacatcatcaatcgtggcaatgattttttctttttgatccgtttctttaattttttgcttggtttcctcgatcgatttcttgatatcagcggcttttgtaaagtcctccgctttaatggcggcctccttagctgcctctaattttttaagtcgttgatccaatgtctcaacatcagtttgcgaatttttagccgctaaatgagccgcagtcatgtcgatcaaatcgatagctttatctggcaaagtgcgttgtggtatatattggattgaataatccacagccgccttcaaaacatcatctggtaatacaacatgatgatgtttttcgtacagctctttaacaccttgtaatatacgtaaagtgtcagcggccgtcggttcatttatcacaacatcattgaatcgccgtgccaaagccgcatttttcaaaatagtattgcgatattcatcttgagtcgtagccccgattacactcagctcgccacgtgacaaagcaggtttaatgatatcagccaatcctttgccaccatcttcaccaccagtggcacctgtgccgagaatctgatgaatttcatcaaagaatagaataatattaccagctgctttaacttcctctaccagctgtttaatattttcttcaaaagaaccgcgatattgagttcccgcttccaaagacgataaatcaatcgaatagatttctttatcttgaatcgtttctggaactttaccagccacaattgcttgtgccagaccttcgacgactgcagttttacctacaccggcatcaccaactaagattgcattatttttcgttctacgactcaaaatttctgcagtttcttgaatctcattctcacgtccaatcactggatctagtaagccatcacgagcctgttccgtcaaattagtccctaacttttctaaaatccctccttttttaacagcctgtttaccatctttagatacttctattgttttattattttggggtagcttaccagttgctcggtattgagcaaactcatctggtgtcaacgattgtccattaactaaataccgtgcacgctccgaattttgattatccatgcgccgaaataattgattgaaaacatcatccatatcattgttaaaaaaaggatcatttccgtagaaatttgccatattaacacacctccataaaaatttatatgtttaacttagtgaccataatatcctttaaaactacaactgaattgtatcacaatttttatgtatcgctaagtaaagtgcttacagaatcaattagaaataattaggataattttgtttaaacaaaagagaaatcaatttcataaaatgaattgatttccctacaaggttccctatttaatagcccttgataaagaccttgaattgacaagttactttccagaccaattttaatttaagagactaatactcatacgcgtggtgctagttaaatatagacagtaaaaaagcctgacggtttacacttagagcaatctatagtaaagaagtgttaagcgtatcagactaagactttgctttttcgtgggcttcgattgccagaacgtcctttgaaacttcgttcaattcattacctcatttcttttattatttatgatacggattaaatcgtactctttgcccaaaaaaatattgttaataggaacttgatacagattagacagctcatttaaaagagaaaatggaatatcagaactatctttttcatatttggacaacgtttgaaaatgcacatcagcagttttagcggcttctttgctagtgaatccagcattagcgcgcgctgcctttaacgacatagcagattattttggcatattgaagtctacgattgatccgcggtatggcgagatacctaaaaatttaatacctgttaaaaaatatagatagattcctgttttgggagaaattgcttgtggagatactattttagctgaagaatatattgaagaatatattgaagaatatagagaagagatagacgaaaacttgcccactggtgaagtcttttatttaaaaaccaaaggtaatagcatggttcctacaatcccttctgatagttacgtgttgattcgaagacaaccagttgtggaagatggagaaattgcagcagttatagtaaacggcgacactgaagcaactctcaaaaggagttaaaactatatcttatgtaaactaaaatagaaagcaaactaacgatctcgttttaactaaagccttagtttgcttctatttttttgtatcaatcttcgttgaattattttttaatatatctgtcgttgcctcttttagctcatcaaattcaccctgataagtggcaattctaactacaaattctacgacttcctgattttccatttttagtgagtagccgtttagcttgagaaaaacatatgctgctagaaatgcagtacgtttgtttgcattatggaatggatgttttttgatcagatttattaataaaactgctgctttgctaaattcattaggatatagtgcttctccaaaaatatgctgcttaggctgatttacagccatactcaaagcatttttgtcaataacgccaattgtttcctgtggtgaatacttctttatttgaataacatttaattttactatatctttttcacttaaataaatcatctatcaactaattccttaaatgctgcatcatactcagaaagagcctggttcacgtacatatcaatttcaaggtctaaattactttcttctttgacaatagcatccatcattttatcttcatcaataaaaatgatatccccaggtttcaatcctttttgtaataaactctcttttgacagagtaacaactactgagttaccaacttctctaatcttcctttttttaatattcatattatcagctccataaaaaaagtatataccgtgtatccgaattaatcaacatcttaatatttgtttcacaatacttaatatttattttacctatatagaatgaactactgggagcgtcaataattttgtgtaaatgattcttccctactgcagattgtttctaattctcaatcagttggcttagcatttgttcaagttcgccttcggcctgttgaaagcctttatgactgcgacctaggaatttttggttgtaagtatcaaaagacgagactaagaaacgttccatcgactcttcgttttggaactgttcctggcggtggctgtatttcttgatttgcttattaaaggattcaatcaagttcgtagaataaatactcttgcgtatggccaaggggaaatcatagaaagtgagcaagtgatcgttcgaaagaatcgattcaaccacttttggatagctggttttccttttttccgcaaaagcaccacgtgcttccaacgccacctctttagatgaggcttgatacaccattttaaaatcatcacagacttccttacgatcatcgacacgcactttgtgactgatattacgggaaacgtgtacacaacaatgttgaaaacgagctttgggatagaaccgactaatcgctcctaccatcccctttaagccatccgtgatgaacaggaggacatttttcaaaccgcgctcttgaaggtccaataaaatttcctcccaaatcgtgatggattcagtcggtgcaatcgcatagctcaatacttcctttgatccgtccgggcgaatgccaactgcgatatgaatagcttccttggcaacggttttccgctttaacggaatatacgttgcgtccatataaatagcagcataacggtcatgaagctcccgccctttaaacgccgttacctcttctgtaaatgattttgttatattggacatggtttggggcgtgtagtaatgcccatacattttctcaatcaagtctgcgatttccgacatggtaataccttttcggaagaggtgaatgacggtctcctctaacgtgtcattcgtccgtctataagcaggaacagtctgttgcttgaactcaccattgcggtcgcgcggaatctggagatgaagttccccatactcggtcttgaccgtacggtcataggagccgttacgagaattacccgtgttaaaaccaatgcgatcatacttttcgtaatctaggaaagccgttaactccgttttgagaagcgtattgactgctttctccaaatggacacggaataattcattcaaatcgcctttgttcgctagagtctttagaatttctgtagtaaaatcgttcatagggaagtcctctcttctgtgaatgtgttgtggtaactctattctacagaagggacttccttttttctatttacacaaaatattttacactctcctgagttaaactgaatatcattctgtctatataaattttaagatggattaccatacttttgtttgactcattgacaaaaatctaaaaaacttatcctcagcgagattgagtgtcttttaccagacacaaatccctactacagataagttttttatttttttatgcttttaggcttttaggtatatggatatttcagtttttccttactgataagtttctgtccgcaagaattcttcttgctttaatagctcctcgatggaacaatttttttccaatgcttctttgacaaaagcagtggctttttcataaccaatttgcggtgaaagggctgtaatagtccctgtactgttatttacagctttcgaacaagctgtttcattgacggtaatacctgccacacatttatcggcaaaaatttgacacgctttggtcaacagttgacatgattcaaataaattatggaacatcaccggctcaaaagcattcaattccaattctccggaagctgccgcaaaggtgatggcaccgtcatttccaatcacttgaaatgcaatttgactgataacttctggaatgactggattgactttgcccggcatgatcgatgagcctgcttgtcttgctggcaagttgagttcatgaaaaccagttcgcggaccgctggctaagagacgcagatcattggcgcttttgttcaatgtgatggcaatcgtttttaatccacctgaaatcgaggcgaaactgtcggtatgctgtgtactatcaatcaggtcattcgctggccgtaagggtcttggaaaacgtcggttcaattcttgatagaggtattcttgatagcgataggacgcattaagacctgtcccaatggctgtcccacccatatttaaggtcaatagttctgccgataagtggtgcagccgttcacggcaacgcgtcaaactgtgggcatatgcagcgaaactttcccctactgtcattggcaccgcctcttgcagttgggttcgccccatttttgccacgtgctgaaattctttcgctttcatatgccatctgtcaatcaactgtaccagcgcttcatccaattgttcaatatatacaagcaaagccagtttcccagcactaggatagacatcattggtggattggctttgattgacatcgtctaaaggatgaagatattgatattcccctttcttatgccccatcaattctaacccgcgattggcgatcacttcattcacattcatgttggtggatgttcctgctcccccctgaaatgtatcaacaataaattcttcatcccacttgcccatgatgatttcttccgcagcagtcacaatgatttgtgctttttctttggatagcgtgccagattgttgattggctagcgcagctgcggctttgatacgtgctacttgtttgatcatcgtcagatcaactttttgatcagtgaaagcaaaattttcttttgcgcgataactatgaataccataataagccccctcgtatataggtagactgccaattgtatctgattcgatcctcatcatgatttaaacgcccctttttgtattatatgtgataaaatatcacataagagaaaaagacacgagccttttcagccatctctttgttaatccttgaaattgattcctttcactttgaaaaacaaagagaaacagtacaaaaacagaaaagaggaaagtatttggatgaactagataaaaagttgttgaatctgttgcagcaaaatggtcggttatcgatcaaaaagttaagtgaagcgttattcatcactgcacctgctgtttcccaacgaataaaacatttagaagaaaccgagcaattgttgtattatcaagcgacgattgactatgaacaagccggcttgccgatcaaagcatttatccacctgtcgatcgaaccacagcaaaaagcaagtttctatcctttcatacaggcgatccccaatgtgttggaatgtgattgtgtcaccggcccttattcaatgttaatcaaagtcgttttcccttctaccaaatcattggacagctttatcaatgacttgcaaaaattcggtcgaaccaacacccaaatcgttttctcgacgccagttccctctcgaggatatcaattctgaaaacccaaaaagcgcgcttatctcacatagacaggcacgctttttttatatacaggggtcactggtcatcgactggcacttgcaaccctcgtggtccgacattcgttgaaaatacaatgtgggttttggtatccccataaaattgcaaatctgtgataaaccgatccaagacgaccgtatcactaaaataaaccttcaagagcatagaataatctccagtgatacagtcacactcgatcacatttgggatgtctgcgatataggcatagaaggcttctttatctttggcattcactgcgcaatggacatacgctttgatcagataaccaagtttttggtagtcgatcagtgcctgataagaacggatatacccaagggtttcaaggttttgtacccgcacagaaacagatggcgatgaaataaagcattgctctgcgatctgtttgacagtgactcgggcattttgctgcatgatgttcagtatcttgcggtctaagttatccataatcatcccccgttctcattattttctcagtttatcgagaaaacaacagaagcgcaagttgcagattacatcctatgttaaatttcctaacatcaacgctgagataattggaaatagcgataaacaatcatcgccccacaagcaaacagaccacacccaaaaaacatcatgtcaaagccaaaaagactggcgatgattccccacaaaaaagccccacctccataagctacatctaaggctgctgaaaataccgctgtcccttgccctcgctgcgcctcagacaccgattctaatacaatcgtattcatcacaggcaataagccggcataaccgacaccataacaactcgcggccagaagcaagctactgagctgtgtcgtaaatggcaacagacaaaaagaaaccaaaatcaataataaactgccataaatcaatgtagccgtttggattttggcgagcaaacgtggaaatacgacccgtgttgtgaccgtcatgatcgacatgaccgtaaaataatagcctgcgccgataatctcacgttcaagggcatattgtgcaataaacgccaccacgccagaattggcaaagcatatcaaaaaaaggataccgctaggaaacacaaccgctttgatgcgaagcagttctcgtaacgatgatttcgcttcgccagagtgcgtattcctccgtgaaaagggctgttctttcaaaaagaaactcaacaaaaaagctgttccgctcaacaagacggccatccgaaaaagtacaggaaatccataattttctacaacagcaagtcctatcaacgggccgatggcactcggcacagcctgggcgatactgaaataccccaatccgactgctaatttgccttcaggaatcgtatcaactgccatcgtcgctgctgctgtcgcttgcaaactattgcccaccccttgcaagatgcgcagacaaaaaagcatcaatagcccctgcagcagattcaataaactaaaatcaatcaacagaatggctaatcccatacaaagcaagactttgcgtccatatcgatccaatgccacaccgattggcaaacggcaaaacaaagcagatagccccaagacacctacaatggcgccggatactgctttagaaccacctaaagaagcaacatataacggcatagtccccatttgggtcgtgatggctgtcattgctagtaccgtgaccaccatcactaagtaaaaatctttcgaccaaagccgactagagctgttcaccttttccatattgtgcctcgcttctatacagctaattgaaaacgtacttgtgtcaaaaattgctgtgtacgttcttcttgcggatcctcaaaaatttcttctggtgttcccgcttctaccaccacaccatccgccatgaatatcactttatccgcgacttcttgtgcaaattgcatttcatgcgtcacgatgatcatcgtttgcccactatcagccagttgcttcatgacatttaggacatcaccgacaagttctggatcgagcgctgaagtgggttcatcaaacagtaataattctggcgtcaaagccatcgctctggcgatacctacacgttgttgctgtccgccagacagttgactaggatacatcatagctttatctgccaaacccactttttctaaggcagataacgctgctttttctgccagtttttttgggaaacgccgtggtgtgcgtagtccttccgccacattttgcaacacattcatgtggctgaacagctcataggattgaaagaccatcgctgttttgcgggcgatctccaatcgttgggttttgccaatatgtgcgagatcatactggaagtcaccgatagaataactccccgcatcaggctgctccaacaaattcaagcaacgcaaaaaggtcgtttttccagagccgctaggaccaatgatgcatacaacttccccacgttcaatttgtaagccaacattttttaagatgacttgtttatcgaaagacttcttcaatcctttgatttctgcttgcagcatactcccaccctttcttttctatcgctcaaagcgcgatcgtattggcagattgtccttctagcaaaatatctcttgcattgttcaaagctgtttctgcaatttcttgtacagccaattgggtataatacgcaatatgcggggtcaaaagcacatttggcagttgattcagctgttgataataaggattttgatcccacccaactgaaaaataccgttcttcattggcgatagcgtctaatacagcaccagacaaacgcccttgcgcgagtgcggcaatcaacgcatccgtatcaacgattcccccacgtgccgtattgaccagacaactgccaggcttcatctgtgcaaaaacagaggccgaaaatagcccttctgatgcttttgtcagcgggatatggatcgacaagacgtccgatgcagcaatcaaggtctcaaaggacacatattcgacaatccccttcaaccgaggattttcactcctactagtggcaatcacatgtccccccatatgataaatcgcttctgcgactagagcaccgattcgaccagtgcctaacaaaccgactgttacgtcttgtagctcccgaccaatcacagaccgtcgatcaagttttcctttgatcattgctggaatattgcgtaaagccatcaagatcgacatcacagtgtaatggcccaccgatgttgggctataagaagggacattggtgaccgtcaactgatgcttttgcgcccagtcaaaacgaacaccgtcgacccccgttgatttgatcgataactgcttcatccctaaaatatgcaagcgttggtacaggcactcatcttgctgcatagccagactaggatacaaacagatgccgtcgtgccctgctgccaaatggatattctcccaagacaagccctccattacgatcgtcactggtgttttgtggataaattgccaccgttcgatataagcaatttcctcttcacttaccccgtaataaatcaatttcattggcaacacctcctaaatgaccccttcatatgctggcggcatagcgtattccaacgcatcacctaataaagcgatcccttgatcgatctgtgccaatgtcggcttcgtaaaattcagccgaaatgaatgctcatagccttttcccgcaacactcatgatattgcctggaatgaccgcaactttcgcctcatcaaggtaatcatagaaccgctctgcgtccatctcagtcgataggaaacaggtgataaaatagccgcctgttggtttgataaaggtaagcttatccgttggcagtgcctgtaatgcttgcagcatgcgggcatatttctcttgatacaacaaggtcaattgggccacatgaccttcgaaatcatgatgatccatatattcggccaataccacttgccaataaaaattggtgtgggaatcggaggattgcttggccaaaatcaatttttccattacaggaccagcagccatcataaaaccaatccggctgctgggtgccaaaatttttgaaaaagatcccgcataaatgattcgtccttcggtatctaatgttttcatcttagggatcggtgtaccttcatacaacaactcaccgtaaggatcgtcttcaaaaatcagcacatcatattgacatgccaatgcataaatggctttacgtttttccaatggcattgatgtgcctaaagggttttggaaagtggggatcagatacaacattttcactcttgcgtctgttttgaggattgtttctaaagcgtcaagatccattgattctgctgcaagatccatcggtaccggcactggtatcgccccatatcctttgatagcattcaccgcaccggaaaatgtttgctcctcgcataacaccacatcgccttcattacaaaagacttttaccgccaaatccatggcttgggtcgagcccgaaaccaccagcacctcctcttcgttatcgatatttgacaattgacgcaaacgttctttgatcaaggtccgtaagcgcggatacccctctgatgccccatactgcaagaaagactctgggtccgcttcgttatataatttttgcgagatctctttcaatgtagccattggaaatgcttctgtcggtggaaatccgtaagcaaaggaaatagctgctgcagactccatatttttttttgcattctctcttaatggagatgcttctaatgtcatgatacgttgtgcgaattgataggccattctatttcctccctacatagttgttagccggccagctgtgtggtaaagcgggctaaaaaggctttggttcgttcttctttggtttcctcgaatacttgttgcggtgtgccttgttcaacaatatgtccattctccatgaaaactactttgtctgctacttcatacgcgaatttcatttcatgggtcaccaataccatggtcgcaccggcttccgcaatttctctgagcagcgccaatgtctgtcccactagttccgggtccaatgccgaggtaggttcatcaaacaagatgaccttaggattcaacgccaacgcacgggcgatcccgatacgctgttgttgtccacctgacagttggctaggataaaaatcttgtcgttcagacaaaccgacttgatccaacaaagcctctgctgttcgcagggcagtttctttgctttgttttttggtcacgatcaatggcatcatgatattttctttggctgttttattttgaaacaaggcataattttggaaaaccatcgctgtttgccgttgatgggtcaatatttcttttttacttgctttgtgcaatgtggtggtggtttctcccaattgaatcacaccttgatctgctcgttccaaaaaattgagacaacgcaagaaggtcgtttttcccgaaccggaaggccccaataagacgactacttcgcctttagcgacatcaagatcaatcccttttaacacttcttgtttgccgaatcgcttatggatatccgttactttcatcataatgcggccctccttagtttgcgcaacagccgattttccagtaattgtgcccctttttcgatgaccaaactaatcagccaataaatgatcgcaacagccacatacgcttctaaaaaccgataattttgctgggccgtgattttagctgccgcaaaaacatcgacaacactgaccatggaagctaaggccgacgctttaaccaacgagatcagcaaattactgaacatgggcaatgaaatcggccaggcttgcgggagcagcacacgacggatgacttgtaagttcgtcatgccgatcgatttggctgcatcgaactgcccttttttgactgccgcaaatgcgcccctgaaaatctcgctgctattgatagcagacattaaactcaaggcggcgatcgctatccaaaccatgttgaaatctttaaaccgcaaagtccaatgcatcgactccgcccaaatatcaaactgtttagcagaaataagatataacgctaaaatcactaaaaccactgggaccccttttaagaccgtgacaatcacttgcagaactggtgcgaggatcttgatcctatacagacgaatcaaggcgatgatcaacccaaccaccgcgccaatgactagtgcggtcaacgccataaaaagcgtcgtaccaatataatgacttgctgttttcagcgcttcgatcataatagacaattgaaaactcatcgccattcctccctattctgggacgtaatccccatctagatatttttctgataattctttgatcgttccatctgctttcaattcctctaatgctgtattgaccgcatcaataaagtcttggtcagcttctttgttgaacaataagtaggcatctgagttgtggactggttcgctgccgatctctagattttcactaaatgaattgttccaattattgacttgatattctggtgctaacgttgcatcgaccgcacctgaagtgactgcttgtacgatttgctcgttgttgtattccccataaaccaattcaaaagcttcgggattttctgccagataagcctcagccattgctgcttggttagtagcagtcgtcacatagactttttttcctgctaaatcttcgaagctatcgtagaccgtaccggcatctgaatcagagacaatatacgtatcccagaccacatacccaacatccccatagacgaatttttctttccgttcatcattgacttcatattcataggcagccatctggactttattgctttctaaatttgataacgtcgttgggaaatccgctccttcaaaggtaaaggtataatcaagtaatttttcgtcgattgctttaacgacggcgacatcatagccatcatattcaccattttcgtctaaataagcatatggcaatgcttcattcccagtacccaccttgatttctgttgcatcacttgctccactgcttgcagtgtcggcagaactgcttccgcaagcccctaaaaccaaaagtgtcaccaatgtaattgcacctaaaatcgtttttttcatttgaattcctccctttccctctacccaaaattttcctatgttgttttgattttttgctgttttttggtccatgatatcagtggtacttttgctgtttgttgttttgttttcgaaaaactcatccgacgttccagaccggtgaaaacacgttctaagaggaagcttaaggtaataaacaagatcgccgcaccgacatagccttcaagtgtatggaaggtcactgcgcctatcgctcgcgctttgccgacaacatccactaccccaatggtaaaagccagcgatgtgtcttgcagcagtgcaatcgtagttgtaccaaatgcaggtaatgcgacacggacaacttgcggtaaaatcacttgtcgatacatttgtgttttcgtcaatccgcaagcaatactcgcttccttctgtgtgaccggtacacttagaatcgcagcccggaaagtttcagactgaaaggcagcagtatttaatccgtaggtgatatagatgaaaataattttattccatgaggaaacatcgatttgaatcatttgtaataaggcgggtacaccataatacacaacatacagttgaaccaatatcggtgtgcctcgaataaatgaaacgaagactgccgccagttgactcagaaatggcactttttcgacacgaataaatgcaagtaaaatccctaaaagcaatcctgtaatcgacgccactgctactatcatcaacgtaaccggcaaagcacttaaaacctttggaaaatattcccaaactaatttccactgaaaaaattccgacatattgcccctcctttttctgaatattctgattattagacaatattactaatggaaaaaaatttttcaatagattcattactaaaacttcattaattttataaattctcccttttaactaaaaaaagaaagatgcaaacggtatctttctttttaatataagaatataaaatactacccgtggtgctagttaattttttcctagaggaaaatgtctaaacatgttggtaaatcaacaaaaaaacgcatatagtagtctcaaaactcccaagaaatgaggactatttaacaaactacgatggttacgtcgtgacaactgaacattttgacttagccaatcctgttactaaagtcgatgatatccccgattatgaaatgtacagtcaaacaatcgatagcttaaataagcgttttggcaatcgtgttttaaaaggcatcgaaatcggttacatcgcttctgaaaaggatcggatcatcgactatttagccgataaagattacgatttaaaattactcagtgtgcatcataatggtcaatttgattatttagatgacgaagtcaaagatatggatcctgctattgtgattcctcagtattttgcacaactttcagaagcactagttgttatagaagcagatgtctttgctcattttgactatggttttcgggtatttggtctatccgttgctgaatttaaacaatatgaagcgcagtttttaccgattctagatcaagtaatcaaaaataaattggcattcgaattaaatgctaagagcgcttacttgtatgacaatttagcgttatatgaatatgtcatcgatttatatctttcacgtggtggtaccttgtttagtgttggatcagatgggcattaccttgaacatttccgtttccatttcgatgatctttttgctctgttaaaagcaaaagatgtgacggaattagcgatttatcaaaaaggaaagcgaattatggttccattaccagtctaaaaaaacgtcctcagcatcaaaagtgaggacgtttttttagatttctttttctaaaatcggacaaatacgatcttgttttcctaaaggaaaatgtttgatcccgatttttttaaatccatgacgttcataaaaacgaatacctgcatgatttttttcataaacagtcaaacgtaaataacgtttttgtttcgttttagcataacgattcgcttcatcgagtaaccgttgccctaaccctttgttttgataatctttgagcagatagagccgttgaatctctatagcatctttttcatcattgactttcatataaccaatgagtatttgatgatccttaataccaataaatttactggttgactgtgccaattctactgccaatatttcagttgtcaattgtgtctgtaaatatccttgcatatcaagtggatctgcgccatcgataaacgattcataaaaactgacaacacttacaacttgtaaagcatctagatcatcataatctaaatacgctagtgtgatttgattgttcatctaactcctccttttgacatagtatactataaatcacccgtggtgctagttaattttaatatcctaaagaatatctcaaagttccttcaaaacgtcgttgtgctcgacttaatagaacactgtaagccagtaatatgctttcaaatctactctctagccctttaacagaacgtgagttgaaattttgacaacctaatttttctaaggaagaaaaaacagtctcaactgtttttctttgttttccaagtaagctgtggtctagtttttcagatttatccatgtttttacgtggcggaacggatatagtaatgcccttaagggcaagcttttcatggattttatggctaatatatcctttgtcccctaggatattgggaagattcgcttcttccgataaagtctctaacactttcacgtcatggacacctggattcgtgatttagtaagtaatcggaaagccagtcttagtaacgatcatatgaattttaagaccataaaaataagatttttttgttgagttatagccaactttggctatttgattcaatagttttgcttgtctatttctaactggtttacataataaactaggaaaactatctataattccgactagttcacctttggtgagcttcttgatgaaaaagtatcgaataatcttgatagtgtaagctaagtttgaacttaagcgagtgaatcgactcctactaggaaagtcaccattaggaaataagacggaacaaaccgctctatacgtagctctttggttagtatagccattaattatgccccatataacacaagcaataatcactgtatcgcgttgcttcagttgatcagtatttcttcggtttttaatcttatctggtacacaattgtggtatatgttagaaacagttctcataatttccttgaatgttataaaagtatctgtataatgttcagtatattttgatgaacgcatatgtagtcctcatttcttgggagttttgagactactatatgcgtttttttgttgatttaccaacatgtttagacattttcctctaggaaaaaattaactagcaccacgggtttaataagttttgtaataattactcgacacggtagttcgttagctacgcagccactgatcgttgcatagtttctgacattgttcttatgattcagtaactcttattccgtttgactcctaatagttcatgggcgaagcgcgtccgtctaaaatagttgtttctatcgtttgaacctcattgacaatttttggagaatcttaccattccttttcagcagttaaatgtaaaattctttaatagctacgcttatttttcatccagaatgataacctcccaaatttttccttctatctatatagcatcattttgtgtttcacgtaattgaactagttgagcaaaatcaattaaagattcaatcgacaatccagcatttcgcaagttttttgctagataaatccaatttaaatcattggtagtataatctcggtagccgctctcgtggcggtgaacgggtggtatcacgccaacacgctcataatagcttagtgtatccacacttaaatcaaacatttcagctgcttttttatattcatcgaatctcctcctcattcttcttatttataataaaccatggagttaactctagagaaaccagaagcctcttgtctctatgctaatactatactaaatacctcctcacattccgtagactattaaaatattaagcaatagataaaatcagttaaatgcaacttctcatattctaatgtttattaagtaagaataatgttaaaataaaaaaacgaagagtattcggcgcagtccagaaaaacttccccaagttttctgtgccggtactcttcttagattaatgcatgttgcttaatcagcctacgctatatatttcttttttgcaagtaattacgatgtagaagcaatgcttaggaatcccttacgttttttctatttttacttttgacttcttttaagtgctatactggataagtaccatgaaagtaggtgttcaaatatgaatactaatttttatccagtggaagtttttagttcggactaccgtttatattcatcaaaagcaaaaacaaatttgtatgattttcaatcgagaccacctttgatcacgtcatttgctgtgctaaatttgaaagagttgcacaatattcaactcaaattatttatttacgatattgatatcgaaaaattttctactttagaggaagctaagggagtgtcaataattttgtgtaaatgattcttccctactgtagattgtttctaattctccatcggttgactcagcatttgttcgagctcgccttcggcctgttggaaacctttatgactgcgacctaggaatttttggttgtgagtatcaaaagacgagactaagaaacgttccatcgactcttcattttggaactgttccttgcggtggctgtatttcttgatttgcttattaaaggattcaattaatccagttgctgcactatataaaaaatttcatcatagtttcgccctagtcgttccaaagattcgatgacaaaaatatctttcttccttaaaaaatgaagttctttttgtaattattctcgtgaggtcttcttttaactacataaaattgtaaccactggttttaagagtagtgtatcatcccaaatcatataattaattgactgcgattgttataaaactcacggtaagccatataactagcaataaacgaagaaatcgcagtaactgaaatcaacataaacatcacaacaatttggtaacgaatcgcttgaacaggatcaattcccgcaaaaatcaaccctgacatcatacctggtaggctgacaagtccaaccgtttttgttcggtcaatagaaggagccatgcccgttttgacgctttctcttacaatactcatggacgcttgttttttattggctcccaatgccaatttttccaatacctgttggcgttggtccgtaaattttgaattcaaagaccgataggtcactccaatcgcagtcatggcgttgctggcaatcatgcctgtaattggaactatttgggaaggggaccagtcaatgactcctgaaaaaacaagaatgagtaaggacaaggctgttcctactccaatagccgtcgttgaaattttaaaagagcggttgatcccctcactgcgtgtatgggcgttataagaagcgttgaacacaatgaacaaaaccatcgctaaagtgagaaagttgttatccactcgtaatacgtagctcaatacatatccaataaggaataattgaacgacagcgcgaattcccgcaataaaaatgtcgtttcctaatcccaatttctctttgtaatcaatcaacaaggcaactatcaagaggacagaggataaaagcaaagaaagattactgatttccaaattgtttgtcatttcgattcctccatttttccacctttgatagtaatcagacgagaagcttggtcgatttcttcctggttgtgagtgacggccaacaccgtagtttgttggtctttcatcatgtctcggactaaatcaaggacaatcgctctgttttcttggtccaatgaactggtaacttcatccaggagcaacactttcggttgatacatcaaatttcggaccaatgcaacccgttgtttttcccctcctgatagttccttgacctctttcgataagtaagtttcaggtatttgaactcgttctaataatttttttgcacgttcccgatcaaatccttcttctcttatgcgggcaggaaaagacaagttctcttgaactgtctcatcgaatagagaagcgttttgaaagaaataagagacttcttttctatactccacaggatcgattttttgcagatccgtacctcgataataaatttttccggaagttggagaaagcagcgtaccaattaatttcaaaagggtactttttccacttccagaaggaccagaaaaaacaatcacttcccctttgtttactgtaaaagagatatcttgaaggatttggtttccgtttgcctgaaaaccaaccttctctaattgaaacaatgaatcactcataccacttctctcctttataaaaaagccctgcaccagtggaccatccatacgggtgctgggcttttgtttcatcctagtgtacctcagtgttcgtttggatcgtttttggcgtcttcatgagtagggtgaaccgttccttcaaggtgatctggaccagcataaatggtatacagtctgagcggcttatcaccggtgttttcgatgttgtgccacatgtccgccggaacaaatacggcgtcatcatccatcactttttgttgaacatgtaagttatctttagaaggccccattttacacacgccttctccttcttcaatacggataaattggtcaatgccttcgtgcacttccaaaccgatgtcatcgcccggttgaatggacattacggtgacttgcagtttactgcctgtccaaatggtcgtccggtaattatcatttcctgtggtggcgtcttcaatattaatgatatacggcttcttcccatgatccttgtagtctatttccatcttccattcctcctagtctttgtactgaaacaatgatacctacttcttatttataataattctaattaatggtaccacatctaaaattctatgcaaaaaaattggctttttggagagcgattctaaacaaagaccatataacgcgcaattacaattggtaccccttaatcctcagcacataaaggaaaaaatatggaatcaaaaaataaccgatatgtactctggttatgacttgaatcagggagaatttcagagacgacacatcatactttttagtttacacttgtaaactaactagcgtacactaagcttatgctcactatcaagcgttgtcaatcctttagactcttatcaatttcgaaagaaagtagcaaggttattgattgtgactgtaaaagtggggtgttcctataagcacattaaactatcttctctaatttatcatgctatttaaattctgttttttcatgagaatttttgtccaaaacttgttaaaatgattttaaaaaatacttacatacacaatccccaaaagacactaatgtcatttcagtcaaaaaagataccgcagaaaatttccacctgagattcaatacgatattactctcttgacagccagcttaattccttagttgaatagattattaaagtgcacaaaaaaacaatgcggcgtttgttatattttctggtataagcgacggtgctataaacttttttgcagattaaaaatcatatgaatttaactccagtaataagagattaagtgccaatgcataaatggaggcatgtccagcactatgcgaatgctaaaacatcaatagtacaggaaatcatgaaaagagcgaatagtaataatgcttaaggagagtgtcatgttttcttggtttgttataggaggttatatcaatgaaaaatacagtagataatttgtcgaaaagtaaagttattttaatgtgcggccctgcgggagcaggtaaatcaacactagcaaaaaaatttgaaagtaccgggatgacaatactatcttatgatgaagaatcattcaaacgaggtttgaatgaacatcctttacctcaggaggttttagaagatattaaaacctatcttgatgaaaaactaatttcacttatcatgcaaaacattgatattgttctcgattattcattttggtctagagaaatgagaaatgaatatatttcattattaaagaaatacgacatagaacccaaaatctattatataaagacacctaaggaagttgttatggaacgtattcgaaaaagaaacggaaatcatcaaaatgatatcatattgacggagcaaacagcttccacttattatgatcattttcaacccccaactgatgaagaaggtgaagttatagtagtcgagggatattaatattgtggttttaggcatggaaattgtactagatgataagttttgtcaaattttttgaaagatatacttccaacaaggggataccagcttcaggtgatatcattattgtcatctcagagcagggggtagtattgattcagccggaagaataagtggcgatgcaatgaagacgatgaatgcattattgaaattacaggaaaaaaacttactgaaatacgttatgtttattcttttgacaactctactcaatcatgattatgcaattagacacgttattttttatcatgaatggatatgttcccgtctaccgatagtgctaaaaacgcagtggatatgtttccgagaacgaacatactcaaatgacattcattctgtcctctcaagccacatcgagttggtgggattgataacaagggtggataagtagaggctggaaatggcttgatatagcggtattttgaggattttggagagttgagattatttcttcttccatttctaaatccaatgttacttgttctgattctggttctgttggctcatttgggattaaatccactactagcgttgagttagttaactttgcaatttgttctagtgtttttatggttggatctgattttcctgattctattcgtgaataatttgatctactcatttctaattcttgggagaatttttcttttgatttggtacctctcatcttttttaagttttctctaatgctagttccaagtttctccccctgtttatgtaaatattttgcacgttttccatttaattatatcgttacaccttgtaaatcacaagtgattaatcacaaatcacttgtgattagtgattttagcttttatcttaatttatcaactgtttagaatattaagtatgctatactaattaacggcaacttgccccgtaagggggtgctattcatggaacaaattatctcgttagttatcgcaccacttttagtgggtctaataatcacattagtggatcattggttagatgattagacgatagcaagcaagttgctgtctaactcacacgcttgtattcgcaacaagtgcaaagaaaagcccgacctactcgcaataggttgggcttttgtgctattcattagaacttatctcgtttcgcacattcattatagcatgattttaaaatgaagccaagttgctgattctatctgttgttattggtgttgcctagaacgattctaagcacatgtttaattttaaagtgggcaattttatctttaaaatgtcctacaatgattcaataaaagcatggctgctagtgaaacttgcgaccatgcttttaaatttacttaaattctctttttaaaaatgattcctgatcctaataccattaatgaacctaggacagacaatgcaatatttgctgtttcacctgtttttggtaaaactttcatttttccgtctaaacctttaactgtaactgttccgtctttttgaacgtctgctccaatttctttagcttcaactttttttgttgttcctatattcaaaaatcatttgacgattaattattttttaggtagcgtatgtttcaataaaccaattgagtctatcgttaataagctaaataatcagcctatagaatagcaagaatggaaaaactaacatgaaaaattttacgaagagtcaatttttttgactcatctaaaataatttacatattatctccaccaaaaaacatagctattaccggcataacgataaggaagattggaattaagcaaattcctgtaagccaaaacttctttgattttttataaattccataaataattatggctaagggtataaaccaaactgcaaaaaaataaattgtgtatgagagcataagtctcttcctccttttaaacaaaggtatcatgacaaaaaatttaactctataagaatttcaattctttaaacctttttaataaaaaatagtgtttaaaaaaatacttattagatactttatctcatttttataatttttacaaacactcttaatattgaatttaattagacaattctagtagaaaagtatctttcatgcagcactattcaaacaattttcgcaacttctttttttatcttcatttcttcattgtgtaaagggccacgataaaatgtaggaaaagggccatcgaaaatgtaggttagatttaaaatctgatattctttttcatgaaaccattcaaggagagtgactcatgcgaaaagatgtcttagaaggagtcttacgacacattatgaacgatattcaacctaactatgcagccatggccaagcaatataattgtgattaccgaacagtcaagcgttactatgaagctggaactaaatgggaagtagaacagatcaaaaagagacaatcttctgctcctcttttattaagcggttttgaagaaattattaaagataaaatggagttaagctgttccgcttcttcaatttattattttattaagaaaaaaggatatcaaggtggctataccaccgtcaaacgatattgtcggaactatcgagaaaagcgtgtaaaaaaagcaaccattcgaattgaaacgacgccaggtctttctgctcaagtcgattggaaagaaaatattaagatggtgagtaaacatggtgaagtcttttacttcaatctttttctatatattctaggctattctcgcatgaaaaacttagaggtaacctttgatcgaacccaagcgaatgtcttcaattgtttggtcaatgcgtttgagtactgcgggaatggtgttcctcaagaaatttggtttgacaatatgaaaacagttgttgatagaagtaaaagccaatttagtcaaaccgtttttaccgaaaatttcgtcaatttgctaaagatgctggattcaatccgattgcttgtcgcccttttcgtccacaaaccaaaggcaaagttgaagctttagctcgtactgttaaccgcttaatggtctttaactacgagtttgaaaatgagcaggagctaaaacgaatcgtctatgagtttatgaatgacttaaataatgaacgttctcaagcagtgaataatcatccctctaagcttcttatagatgaacaatcggtgttgcgtcctttcaatcgtttagaattagtcagatatgtttctagaacccaacacgtaattagaaaagtttccattgaatccatggtccaatatcaaaactcaaagtattctgttcccgtgaaatatattggtaaagaggtaactttagatgtccgtaaggacagtctattcatttggtatggccatcaatgtattcgctcgcacccattaagcaaaaaaaccttaaattatcaacgtgatgactctcttgagattcttcgatctgatgtcttcaaatacttagaagacgaagagttggagcgctttgtagaagaaaatttagatgcttacgatgaattataaggaggctcatatgtcaaattaccatcagttattaaatcaattatcagatttaaatcttacctgtatcaaagaaattttacctgcccatttagatgaagtagctaaaaatgaacaatctctagttgattctttatttgaattaacacatcaagaaattagctatcgtagaaaggagacccaaagaaaaattttaaaacgggcaatgtttccctatcataaacgccttcatgatttttaactttgattttcaacccaaaatcaaaaaaagtgaaattcaagatttagtgacattacgctttttagacacgtatgacaaccttttattcattggaaatagcggtgttggaaaaacccatttagccgtttcaattggtttagagtgtattgatagagggcagagctgtttatttatcactagtacagaactggttaatcgacttatccgggcacataaacgtgggacaagtgataccatgctcaaaaaatatgcgagctattctgtattaattattgatgaagtcgggtatctccccttctcaaaagaaggatctaacttactgtttcaactaattaatatgcgatacgaaagaaaatcaacgattattacaacgaatattcctctgtctcaatggtccgaaatttttggtaataagaaattgactaatgctttattggaccgattggtccatcattctaaaattattcaaattacaggaccttcctatcgaatgaaaagttatagtgaaacgaaaggaaaagaaacgaaacgataaagagaaaactacctacaatttcaatggcccaaaaccaacattttattatggcccttgacaactggcaaaccatacaacttttaaacaactggcaacaacgtcaaaaaaaggagctttctatactaggtttaagccatcagagtaataagcaactagtcttccccaatcgttcaaataacttttgtcgtcctagtcaaccaaatgattggtatgatatgatcgctaataaatataaacttgaaaaacggataactcttcatgaatttagaaaaactcacgtttccttgtgcgcaatggcagatatgaaactagaggatattatgtatcgtgttggacatagagattcaaaaatgacaaaacaagtctacaactatttttatccagaacgagaagaacgaagtgctgataaatttgctcaatttattgagcaagaaaaagatttgttttaatcattttcataaattttggatacaaaataggctagtatcactgaacaaagtaatactagcctatttgtctcatcaaatttctaccaactcaacgagaacaaactaccaaaatggtatgcttacctatttttcttttgatgcactaacttattgcttgtagtaaactagttaaaacaaaaaacatttcaaggagtgatttaatgtcccaattgaatcaaacatacgaaaattatttacaacaaccagaagcgttatcttttactgaaatgaccactatctatcaagaaatattgaaaaatgctgatatgaatgataatgattttatcgggatttgggaagagctgatgggtgctgctattcgttatacagtcattcgtgcagaatggcctcaattttctagggaacaaaaactggcaaaagattccgaacgaacgaatattcacaataccattatcgaccatttcatcctattggaacgcatctttcaattaaaccattgggacagtcattcttggacatcacgcttattcttacaagaagaacaagaacaacgtacaagaagtgatgtgaatgaccaccgacaacggattggcgatttcgcgaattatttggtgtttgtttcagcggttaatggacgatagatatgaaagtcacgatttgataaattctcatcatagtagattatcaatatttttttctaacgtctactatgatgggagcatatcatttgattatcagttcttatacattttctttaatagctttttacgtctgttttttatttgttccatcattaaattctccgtcagaggagatatttgatcaaatttcttttgacatcttctagcataggaaatgaagtttccaaatttactccctttactatcccttacacccacatcaaaaaaatatctataaatatgccttttaccaattagataactcgagttctcaaattcccctacaccaactaagcttggctcacctagggctttgcttgcaaatgtaagttcaacaggtgtctcatctaacacatatcctctaggcgcttttgtctcaataaattgataatctcctggtgccagattttttaccaatacaacccccttatcatccgatacaagattttgtataaccgtttttccttctttatcgatgagcttgaattttgcgccaggcaatgggttttctttactatctgttttcaccaattgtgctgattcttgataattcacaaaaccttcacttgcaatacctacttcaggttgtccctctgttgagtcatttatagtgaaatctttaaccgatagataattggctacttttgactagtgccatgattgacatggtattggaaagatattcaacatatactaacaaaaacagaaaacgattatttaactgaatttctgattacaatttcatgttttacaatcttagattctacgtttccgcctttttcaacaagttgaatcaacatgtcaattgcctcactccccatttcatgaaaaggttgagatactgttgttaaagctggtgtactcattcttgctgttaatgaattatcatagccgatcactgacaattcctcaggaattttaatcccagcttcagaacaagctgacatgacacccaatgctgtttcatcactggcactaacaattccatcatagcaaacacccgattgaataatttcctccatattcttctttccagaatcaaaaccataatctccaaaataaatatctgtatcagaataaatcaattgatgatggatcaacgtttttttaaatccttttatccgtgccttccctgcgatacgatcagatggatttacaccaatcagagctagtttttgacttccacgcttgattaaatatgaagtagcatcggcaatcgcctgttcatcattgactttaacaaacggaatatcccccttcaccgtatctgcagaaagcaacacacaaggaatattgtgttttttaattaaatggatctcatcatttgataaatctacagaaaaaatgataaacccgtcaacatttctctccttcataagcgtgatgctttctttcatcctagacccatctacgcctgcatgtgtcaaaataacgttatagcctctttgataggcttcatcttcaatcccgctaataatatcaccataaaaagtagtagcatactgcggcataataatacctaacaaatttgactttctactcaccaatgatacagcagatttattctgactatagcccaactcatgagtaatagctaaaattttttgttttgtttcctcgctgtatccaccaagaccattaataactcgtgaaactgtagctatcgagacattcgctctcttggcaatgtctttaattgtatattgcatagaaacctcctgagtaaacgcttacgttgttagctctagtattacacaaatatgagggaaatgcgagaggttttagtataaaaaaagaacctcgcgccttcattagtgaaataaatgaagcacacgggttcacaataaattttcttgttcaacgtttgaacatgcgccttctgcgggttgatcttctgtcgttcatcctttttgcttaaagtaaagcatgtcccaatactctaacgagggaacagtgatcgtaacgaaatttccttgcgcatcatgtccatattccatatccagttctttagaaacggaattatatctcggatctggggaagtgagccaagcactttcaaatgtgtcattcgtataatatttcactgtcaaatcttcaacaatagtaggtgtttctttctctccttgatttgctcgccaatcattatcagaaacgccaagtaaattgatcatttgaatcgtatcgaatccactaccagacttactatatgcccagattgtattaggctgtccatcgctcgattgattttgatcgacaaattcaatctgatgcccattatcttctaatccatcccgcaaaagattttgataagcaacaataaaattttgcagcgctttttgacgtactttgtgttcatctgacatatataaattatgcttgggaaaatattcattcgatagcattgcgtcgccatcacctaattcaatacgtgaacctcctgcagcatatactgccgcatctgttaataaaactgcagacatattaaaaggttcactcaccacactctcagcataatcgtattccatatatgctggaatgatcagagatttcccatcactttggtctcgagaattatcgatgacgttctttagactttgataagtattgtactgctctccatcacttgttgtatcccaaggccagatttctgcatataggacatccacagcagaggcatttacctgttcgataccttgagcacctacaggattaaatgatagataatagctatcaagcttctctttggcaatatccaagaattctttatacccatccttcacataaataccttgtgtctcatcaccaatcatatcatgagtccacatttttccccattcacccactgtatctccatgccaaccatcaaatcccatcacttgtagagcttctaaatttttttgaataatatagttttgccattctggattttgaatatcaaagaaaaagagattggattgacctgtaggacttgcacccattgagaatgtaaatcgatcacctttatttttaccagcttcatgatcttctgcataccacagcccccactcttctttgataccatattgagcataattatttgtcgcagcataaatcatattataggacatatttgtcatccctcttgcttttgcttcagctatgtagcttttgatggtctctccactaatcttgcgaccagcccaatcttgccacttcattgttccatcttcaggaattaattgatgatgcaggtatttccaatcatagtattcaatcccatttaattgccagtcgttcatttgctcaatcactgcttcaatgtctatatccttatcgaaatttgtcaaaaagccatatctaggaaacttcgtccatgtgcttgacacatctgctgctgtattcatgtgtcgaatagcgtgaccctctgaatcgagtatgtccaattcaaataaatagcctttaaagtcttcgtttggtgcagtccattcaatttcctcttgaatgctcccttctgatgtcgtttcccaaacgccttcaatcgtatcgattgtttcgttcaagtatttcacgttgacaagatacttgcctttagatgtttctagagaatttgaacttgtcgataacgccaagatgatggtttccccgggatcatacatagatttatctactgaaaactttaatgttgcatcatattgaatgcccaccatctcctcttgcaattttttgttcatataagcactaccaaaaataaaaacgaaaagaaaggcaatgataataatcgaaacagtccagcttttttgtgtatctttttttgttgcaagaacttttctattatttttttctcttattttcgtcatatttactccttttctaaatatttcagtcactaagtaaatcagcttatttctaagacaacagcttcataggggtccaaatagagcataccttttgtatattctttcttcgtataattctgaatcaaaactgattttggctcttcctttagatcaaaagtagttgtcttttcttgaaaattagtaatgatcaaccatttttgctcatctagcacacggcaataagcaaaaatattttcgtcttcggtatcaaccaaattataagttccccaaactacaattggatgttcatgtcgcaattggattaattttttatatgtgtagaaaagggaatctttttcctcaagagctttctccacattgatttcaggataattaggatttatatgtagccaaggtttattcgaggtaaatcctgcattttttgaatcattccactgcatcggtgtccttgcgttatctctcccttttgcattgatcgagtccaaaatatcctcttttgcatagccctgcgacaagcggacattgtacatattgatactctcaatgtcatcgacttcttcaatggtttcaaccggataattgatcataccgatttcttctccctgataaatatacggggttccctttaataaatgcagcaaaattgcaaacatttttccactttggacgcgaaactctttatcattcccccagcgagaaatgattcttggtaaatcatggttattccaaaataaactattccatccctcggaagccagctctgtttgccacttggaaaaaacgtcctttagtgctggaatagacaggtcgattaaatcccacttttcttttcctggttgctgatcaagaccggaatgctcaaattggaaaaccattgacagttcattacgattgggtttggaatataatttagcaatttctggtgttgctccccaagtctctccaaccgtcataagatctttgttgccaaatgtagctcgattcatttcttgcaagtattcatgcagtttaggcccattccctgttatctttttgaatggttgtttaccaactaaatcaataacgtccattcggaatccgccaatccctttttcaatccaaaaattcatcatgtcataaacagactgtcttacttcttgattctcccagtttaaatccggctgttttttactgaataagtgtaaataatactgtcccgttaattcactatattcccaagctggaccagaaaatgttgaacctaaatcattgggcggattcccttgtgaatcaggatctgaccaaatgtaaaaatctctatattgattgtctcttgactgtctcgcctcaacaaaccagggatgttcatcactggtatgattaacaaccaagtccataacgattcggatattccgcttcatagcttctgcaatcagaatttccatgtcttccattgttccgaattcgtccattatctcttgataatctgaaatgtcataaccattatcatcatttggcgatttatagacaggacttaaccatatcgcatcaatgcctaaatacgccaagtaatccaatcgttggataatcccttttaaatcacctatgccatccccgttactatcttgaaaactacgaggatacacctgatatacgactgctttttgccaccatgaactcatattgaatctccttttacatttcatactttttaaatacacttaacattaaaaatgattttaagaatacaagaaaactacacccaataaaaatgctcagatacaacacaaaaacaaatgcaattggggaggtcactatcaaaaatagcaagaacaatgtgataactgataacaaaaagctcacccgcatatttgctaagacaagcctcatagagttcatgaaaacaagcttagccgaatctttaaagcgtgcaatataaccatacgtatattgactacttaacacaaggacaagacccacgatagataccccaagcaagccaatgagattttgctgatccaaatggatcatataattcaaatcgacaaccacaacgaaaaaaacaatagattgcatgatactaaaaccaatagcttgtttgaaatttcgtttatatgccaaaataaagttttcaataacacgtgtatcattgttttcatgcaacttaaagcaaacggcataagctgcgctggttgcaacaccaattgttacaattgggatactccctattaaaatacataaattgagaacgaacagactccacaacttcatcaaaaggttatagacgggtccatctattcgaaaaaaagaattcataggtttacttcccttcttcttaggttcttatcgaatccattgacttgtttttcaattatctcatgattagaattattcttttacagccccaacaacaattccctgtacaaaatatttctgtaaaaaaggataaatcactaacaaggggacaatcgctacaatgattttcgctgcattcagattacgatctgaaacagctaataaactttgtaattgttctgatgtcatgccgcttgcattttgcaaagtttctgcaatattgacagacagagattgaatgtacgtcattaatgggtaattttcaatttttgtcatataaatcaaaccaccaaagaaatcattccagctcccgacaatactaaataatgatacagttgccaaagaaggtaaagatatgggaatgtatatcttacgcagaacatcaaatgcatttgctccgtctaataatgcagactcttccaaagatttaggtacccctcgaaaaaaattcatgactaaaatgacactgccaataggcacagcacccggtaatattaacgcccagatactattgatcattcccagattacgcacaatcaagtaggtcggtatcatcccgccattaaagagcatcgcaaaaaccataaatcccataaagaaacgtctagtccgaaacactttttttgattttgataatgggtaagctaaggtgacgatcatcactaaattaaggaccaaagcaacaaatacacgaaaaacagagatcccaaacgaacgccaaaactgcgtatcgttaatgattctttcatatgctgcccacgtgagatctactggccaaagtcctactttattccctgcagctgcttgggaggaacttagggacagcgccagaacgtttaataaagggaccaaacaagatagtgttaataaaataacgattaaataaatcacaaattgtcgaataccgaatttctctctcatttttttctcctctctatgaattaaaacataacccgatttgtggctttttcagctgttttattcgagacataaatcaaaatcaaaccgataatcgaccggacaagtcctactgcagcccctaaactataatcacgtccgattaacccaattctataaatgtaagtatccaaaacatctccactagcatagactggtggtgaatataagttgtaaacttgatcaaatccggcacttaagatacctggtaaagccaagatggtcatcaaaataataaaagacatcatgcctggaatcgtcacatgttttacacgttgcaaccaactagcgccatccattgttgcagcctcatataaccctggatcaatcgatgtgattgccgctaagaaaataatagagttataaccaaatcctttccatacatctgtccaaatcaacaaatgtggaaacacagcattgctgcccaaaaagttaattcggtccaagcctaagctttgtaacacttgattcacagtaccatctaaattaaatagattgagaataactgatgccaagatgacccatgataagaagtgtggcaaataaacgattgtttgcatggttttcttcatccatttgacgcgaatctcattcaataaaatggcaaagataatcggaataatggtgttcaacacaattttccctactgcgataaaaaccgtattgtaggttacttgccagatatcaggcaaattaaaaatatagataaaattatctagtccaacaaaatccgaacccaaaaagccacgcgctggaacaaaatcttgaaatgccataattaaaccaaacattggcgcatacgagaagattagtagaaaaatcattcccggcgcaatcattgctagaaataaccactgatctttagaaaaccacttcttttttgttgcaagcttttccataaactttctccttatttgataattgataatatagtagagcatttgcagcaatgaacaaatgctctacccaaaatttagaaatgacctttattcatccgcgagcttttgcatttcttctaaaatcgcttgtccaccctgactattccaagtcttcacatatgaatcaaaattatccaaagattcttcccctgtcacaaatttgataaacgtctcttcttctaattttgaaatttgggcaccattccgctcacttgctttaatggtttcaaatgtcgtaaatggcgtgatttcattatagatattctcttcccgtacaccgttcatcacattagttacagccaataatctcgacgcatagaccgcccaatctgttggatctgcagtgctcgggtcatcaagataggttttaattttttgtgcattgttttttactgtgaaacttgaaatatcatcaatatctatctcaccttcagccgcttgagaagcttccactgcatcagatatttcacttaagttttcgaacatttcaatattcattggacgtactgatccgtctacagatttttgcgcataggcatatatttcaggatactctgtttccatatcggttgagtttggtacttcatcaaacaataaattgattatttttatggctaattctgggtttgcaaaatttttattaacaactacatagccacctacacctggtttgctcacaccatttacttgaccatcactactctcaattgcataaggcgtgaatgctgcatcagggtttgcagtttttgcttgaaccaaagcccaatcagataagtgccaagggccaggtataataccaagttctccattaatcatcatcgcattgatgtcgtcgtatgttcgcgtaccaaattgatcatctaaaattccatcgtcaaatagttgttttacgtagctcaatccttctttggttttggcagtatttgacccgtaaaccaactgaccatcttccccaactaaataatttttaggaaatgaatcaaaggcattgaatatcgcagttgctgtatacccagatcctccatgactatcggaagttagccaattggcaaatgcgagaccttgtgttttccctgttcctcctgcatctttgtctttgaacgttttggccgttgattctagctcttccaaagtaatggcatgattgccatcttcgtccaattggacatccaagtcatctaaccaatcttgtctaatccaaaccaaattaggaccaaaatcattcgcagtgcctggtagtcccataattcgatcgcctattttagcagaatcaatttggacattgtcaaaagaattgtaaatatttttgatattatcactagcgtattcttcataaacatctgttaaatcagcaatcaaatcattgtcagccaattcctccatctcatctctgctgacaaccattacatctggtagatcgcctgaagcaatggcaagcgacacttgtctggtataatcatcaccatttgcctcaaatgcactctcaatactcacacctagctcttcttttatcagtcttctataagcattatctgcataagagtctccatcagggagtttggagtttggctgcgtctgttgacccactgtcatgacaatatttccatcggtatctgtttttgcttctttgtcttgttcgccactgcatgctgcaagtaagacaacactactcaatacaactgaaccggtcaaaattttatgcatctttttcattcgtaatactccttttattcggtctacgtaatcgtttacataaataactaaaaaaaatgagaaaatactactaacaaaacaacgtaaacgtttactctataatagtatcattgtctatacgaacttgtcaatagcgctttcatttttttgtttattacagatatatatctatatcggtatcactagttaaaaatatagtgatttagagactccatcatctcctgtcaagggcagtttaaaattgtgggtttgggggtgcggatgtttttctggaccatttttaaaaatacatctttgtttcttccgatattgaagaggacttagtcctcctaaagttaacttgatccgtttatgattataccagtggatatagttatccaattggtttataaactgattgattgttgtgtttttccagtcacgttgataaaacacctcgttttttaatcgtccaaagaaaccttcatacactaagttatctggtgagcacccctttttagacatggagcgagtcaagtttgctttgttcattcgctcgatccaatctggtcatcgataatgagccccacgttcagaatgaatgattggacgctcttgaccttgaagggtagagctcagctcgtccacaatatagcatagtactcactaattctgcgtcaggatttgtttcaatggtccaactaataaaagctccatcgtagcaatcgacaagcgggaacaaatagattttccctttaggaattttaaactcagtaatatctattaactatttttcatttggtttttttgctttgaagttacgattcattagatttggttgtacaggagaaatcttctgagcatacgaatggttcgtgcgtaatattggccatattcaaaataataatccacggctattcgtttttgttcttcagaatactttgatttttccggtgattatgatgaagcttcccagataacaaatattcattataccattgacgtagtgcaccaacggacggatagcttaatttccaaatgatagcagcataagaacaatgatattttatattttcaatcttaaaaaaagtatcttatctttatttcccctatacattttcgttttcctctgaaaggttttcattacttagattatttttaccataacaatctaactatccatttctcattggtgttaattttgatgttactttctacacacccaaacaaaaaaagccagaaacgccttcaaataggcatttctagcttaaacaattctattaccccacagacccttccatatagattttcaaattacacactagtttaagataaaacaaacaaggaaaaacttaccatttactcaaaaaattaactcatataagtacattagaatgtaaaatagactggtcaaaatctggtcaaaaaagtagatgtgacacaagttcgcattcaaagcgatgatccatgatttcgtaatggtcaattatatggatcaaagccacgcgacaagagcgcaatggatgtctctaccgattggttgaataaacgaaataaatagaatgtgaaaaaggatcggacaaatgttcctgtttgctcgatccttttttatttgaattcattttcgctttatcaaacatcatttgattactcagttaaatacttttgacatgagtaccaatgaaacatttattcattaaaattacttatttcttatcgcctttctagccaatgccaatccgccgattattccagcactatcacctaattcgggcgtaacaatgtagctagcaattggtggtatttcaacatatccatttataagctcaacaaatttatcctgaacttttttcttcatgtgttcttgtttcattacaccaccgccaaaaataattctatctggcgaaagcatcagtgttgtattgtatgcacattgggcaaggtaaaaggcttcaatctgccaaaacgaatcgtcagccaataaattctggccttttacacccaaccgtttttcattcgctggtcctgctgccatcccctctaaacagtcttggtggaagggacagtttcctgaaaaaatgtcctttggatgtcgcttgatcaacatatgccccatttccggatgactgaacccttccacgaaagtcccattgaacaaggcaccacctccgatacctgttcccacagtgaagtatgcaacacctgctaaccctttgccagaaccagcaacatattcaccatagcaagccgcattaacatctgttgtccattcaatcggaatattgaaatgttgctttagcgttcctacaaaattgaaattctgccaagcaagtttcggtgttgatgtgatatgaccgtatttctttgatttacgttgaatatcaattggaccaaaacagccgaccccgattcctgccaattgttccttaaaaggtttaaaaaaatcaatgacctgcttcattgtttcaactggagtcgttgtgggaaaactgactctttccaaaatcgtcaattcctcagtactcactgcacaaataaatttagaccctccagcttcaattgccccatatatcatcataggcttctcccttcgaatatgtgtaaaacacttcattaacgcggcaagcgttctcgatcagtgaaatgacgtttagtatttcctgtggacgtcccaactcatcgtacttatgaaaggcccacgccccgccaaaataatcttctgaacctgttgaggttacggtcggatactcactatccccatcaatgtagaatttaaactcgccttcgccccaccaataacgttctaggcaggtaagcgcaaggtaagtacccacgtaatagccttgaccctttaatcgatcaattaacttataatcctcctgtaatttggtaatgcgttcccgatgccaaataatggttgaaggatttccctgccccattttttcagaagtcggtcctagacttattgattgtccaagaaactttctttacgtccacttcattcgggctttaacacaagcacacccaaccttctttgtagctgagaatgtaaagggcatgatgaccttagggaaaggagaagttttaaagcaaataatagaagattttacttctgccagttatacagttacaccacatcttgtaaatgcaagagattagggcgtaccacaattacgagaacgcgtatttctaattggtttcataaagaaaaaatcgaaaatagatttagttatcattacacggaacctgaaccatcccacggtgatatttcgtatataaatctttttaataataaaaaaccttatgtaactttgaaagacgctattgggatctagagtctgatccaggagacttttttgaaggagattactaaactatttatatgagtcgtaatagaaaaaatgtgggatgagcaatcattcaccatacaagcttctgggagacaagctccataacatccaagtggggaaatgatgacaaagttagagaaaaacaaatggagagttaacggagaaattaatcataggctttcggttaaagaaatagcacgcattcaaacttttactgattggtttcagttttctgctggaggaagtttaaaattaagtaaaatggtaggttggataaaatttacaaacaaataggaaatgctgttccagttcttttagcgaaagcaatgacataaccaattgctgattttgtgtccactaatgtattgggggaagtaatgagaactaatattattgatgctatgataaacatagttcattcaggagtttatagcctacaagaatcatatatcagagcaagccgggcaacttctatgggtgatgctttagataaatatgtgactgatagcttctgtggagccatcggggagtcagatgaatttgtgaggttaaaaaataaaagaggtattttcttacctagggaacgactcctgctccaccggatgcaatgttaagaggtggagcaggagtcgagataaagaagatacaatccagaggctcttcattacaattgaacagttcccatcataaatctaaattatatgcgactgatccattgattactagtcacgatcgagttatcttgcgattgccgattcgacaaaggacgcaccagttttttccaagcttcaattttctttcgtttctgataattaaggtttttgactttacgtaaaaatgtgatattctcggttttcgtcattgtaaattcatgctttattgattgtgcaggaacttcaataattcatgaaattggtcaatgacgtgtttttattttgtgaagtggctaagttcattataaaatccgccattcttttattttcgtattttaacttcggatatctttcttttcatttcctattctatccacgcagtgactgggaaatgatcagaaggatagcgaccattgatacaatcagtgacaatttccgttctaagaagtctcatcgccggatttatccaaatgtaatcgattcttgacatcgttgaccaattgatatcattacaaaatttattagtacctgtgcaggttacaaaagggccaatatgatagggtgagttaatcagcgtatcttttaaagtctgtgaaaactgtttataaaaagcttctcttggttctccatttaaatcaccaacaatcgctgcatttttttcttttctttctttcaaaaaattagcgattaaagcggctcctttttctctagcaaattcacttgcaaaatctaaatgagtcgcaatgaaaagaatttctttatcgctatttttttctctcagaactgcccacgtagcaatccgtggacaagcagcattccaagagtaggcatgcgaccttttttcgggagtatctgacagccaaaaagtgccattgtctaagcaaaaaaacttatcttctctataaaacacgggattatactctccttcatcagaatcgtcacgtatttctccaacaaaactatacttatctaattccttcaattcttttaattgatcttcttttacttcttgaagtccaaaaacatcccaattttgtctttgaattattttcttaatagattcttttcgattctcccaactgtctaatgggtcttcgtataaaggtccactatttttaatattaaacgttcctagtctaaacatacttattctctcctataaaaatatttttaacttttttaattataacgattattgaagattatgatcttttgacttattctcttcgatttttaaatacatttttttatataaatcattgagcttatcatttggaaaaagtaccaacattttagcgcgagccatgtagtgaccccaaaagttggacttttatggagtggagaaatccactccttttttgtacgataaaatttgctgttagacagctgtttttacagcttctcgaaactgaaccggacttcgccaatttaatttcgttatgatgcgtttatggttataataatagatatattggtcaatttttgttttcaattcatctacactctgatagacttctccatgaaaaatctcttgctttaataaaccaaagaagttttccataggtgagttatctaaacaattccctttacgagacatactatggaagattttatgctgcttcaatttattcgtataagcattcatttgataggcccatccttgatctgaatggaaggttctacgaaatgagcaatcatttgtcatctggattgcttcttctaatccttccattatggctagtgcgtatggtttttcagaaatctgataagatagaatttcactattgtagagatccctgaaaggatctaaatacagctttttctgacgaacgatacctgtggtgtctaattcataatacttaaactctgtggtatcagttataattttttggtgacagatatttgtataaaaccgacgatgcatacgatttttggcgacagtaccaaccttcccacgataagaattgtaccgtcgagattttcgagtgtaagactctacttcgatacctagtttttttatcagacgttgaatcttctttttattgatatgaatcccttgattctctaattctttttttagtcgcagacagccatagtctttatgctctttgcgaatttcaagtattttttcttcaatttcttggtctgggtttagtctgtcaaatcgtttctgccaatacatataggttgctttaggaaacttcaatgtttcagaagctcaactagtttgaatgatccccggaggctggcgatgattcgtacgattgattcttgcggctttgctgggcttcctgttttcgcatcttcctcaactcttttaaaaaggcattctcaatttgaagggatcggacttgcttttctaatgccttgatacgatcgcgttcttcagttgttgtattttcttttttgttttcttttttctagtcaaagtaagaggtcgccctttcttttttgagagcctctcaatacctgcttctctgaaattacgtatccaattggtaataagcgcggggttgttcatatctaaagtgctgtcaacttctcgataggacatctcacttgtttgatataactctatcgcatttaacttaaattgaacagaatatttctgattttgacgttttctcaatagacctttctctccgtattcacgataggcattcacccaatcacttacttaagacttgcttgaaataccgtatttgttggcaagatgccgatatcctcccacgccactaagatattctttaacgatttttagttttaattcaaaatgatattttgccatacagatagcgacccccatcgcatcaggggattgtttctcatatttcatcagtgatctgcatagaccagaactttgggacaaagatccacttgagctacttaatggaatttaagagagccttgtcatactcgctctgtccagtgtcggaggaatagacatagtattatacttataacctttgtcattatgcttttgtcttcaaatccggcgaatggtgctattcttaatttctgtgtgaatagtttggcgagcacgatcaaatttctcagcaatctagctcccaaacatcgcttgtccaacgaacgaagtatttcaatttgtacacgttccttataagtaaggtgatttcctttaagtgattctgtggtattctaagtttacgtcatcgtgatttcatccttatggtagtgtcggaacttcaataatacatgaaatttttcgatggcatttttttattttatgaaacggataagttcattataaaattcacctgttttctttaattgaaataatatcgctaattgtgatttagactattactttgaattttatctaaccatatttacatattgaccacttttttacgattatttaagacactgcgatgcgcataaacttctctttcggtattttcaatgactaagccaattattatttcgttaatattaggagatagttcaataattaagtaaactttctcattcactggaacgtcaattgaatgactgttggccgccaccgtcgccactgtatagttactatccaagaaggtttttttagccgaattgatcgatagccagtactgctgacaatctttacactatcattgcctttccaatacatagtaggggtggtacctacaccattattacctccacctttaagaaactgactaccaatatagttactgtcaaagtttcgctatttagagactcactataaatgcacagttcgatgatatcgacctacttcgcttcatcggtaatcatattcatttgctgattgaataagacttcactgatagaggatcaagtatcacattagacactttcgtttatcaaatggtacgactctttaaagccttcattttctcgaaacggtccaataccatcggtgatatacatcttcttggtaatatgcagatacccgatctgctttgttccagatcatctctcgacctaaaatagtcaaataatgattgactttttccactacatctaggaaagttcacttgaaaataagccactctttatcaatgagataaccgtcacaatacattttgtgatattccatgtctatccatttgttttcagttcctactagtttataataagtatctagataaccatcttcttgagcagatgcgatataactaataatttcgtcaatctctgtgtccaaatcaggatcctgttctaattgtaagaaatacgtagcaccttataacattttatagacatcggactcgtcgaaataaatcccgataaattctccaagtatcaggctcctcttttttgaaattgtctatgcgaccactttcataacacttatctaaacaggtacggattaaaaattttttctattggttcagcttcggagtctaaaaattgttattgatggtaatttgattgaagttgatttgatttgtcatttggatcctcctatgaaaaaatgactttatgaaacacggaataagccacttttaaccagtggcctatttcgtgataaattatctattttggtgtcatgctaaatggtcgtttttggttgaagcatttaggatttggtaccataccaagttcaaaattaagattcatccctgccactaaatcatcatgagaaaaaaaggatttgtgatacacttggccagattcagtcactcgatgaataaattgttgttgcgggttattcatttcggtagtcagattaagatccttgccattagataaatggagtacggctttgtcgaaattgggcataccaatcaagtactcgtcatgtcctgggcaaaaaggatagaaccctagagagttgaaaatataccaagtagccatgctaccattatcttcatccccgggatagccttgccagccatcgctaaacaaacagttgatagcttgtttcaataaaggctgggcataataaggcttaccgatataactgtatagataaggtagatggaagctaggttgattccctacgttgatttgaccaaatccattgtactcactttcggccatttcatggattagatgaccataaccttcaacagtaaaagctggtttggaattgcccaagcgcaccaaaatatcttcaaatccctcatcactaccataaaggttgattaagccctggatatcttggacaacggcaaaattggattgccaagcacaaccttctgtgtaatcaccaccccaagaaattgggctaaagttttcgttaaatttaccttcacgatctttagccaccataaatccttcttctttcgaaaagaggttgcgatagttcatggattgatctgcatatttttgggcaagttccacctcgcctaatttatatgccaccaccgaaatacaataatcgctatagcagtaatctaacgtatgattgacagattcatgcatatcttgtggtacataaccatattccaaatattccgcacaataagagcggccaaataagcgtttttcatcttgtaccatcgccgaatgaagcattccttccaaaaattccggcatcaaatccatccgaatctctttggctgcagcatcagcaatcacagcgtcgatataattgcctggcatccctccagaatcttctggagataaccatttaggtaagaatccactttctttatagttatttaaaaatccttccaaaatcttcgaatattcttccgtttcaatcaaagaatataaaggataaaccgtccgagccgtatcccaaaagccattgttcatatagagatatcctggttttacattatcttcataaacatctcggtgaacgggttcacctttttcatcaaactcatataaccgctgagggtacaaaaacgcccggtacaaattgtgataaaaggtgctaactttatctttgtccaagtcggttacttcgatcttggctaatttctcattccatagattagtggcggttacttgtagtttagcccctggttccataggggtgtttttcacagcatatgttgtggaaataaaagaagtacctactcggagctccaccgttgatgtatcttgaaagtcgatttcgtaggtatcatcatcttttttagtcaaatttgctacaccagtttccacctcgatgtggaagtacagctttagcgggacctttccgtgagtatgcaactggttagaccaaccttcaattaccctatcttcagctttagtaattgtacccgaagttggaaaactcactagcatacctttttgatcttggggagatgtcatagtaattaaagccccgtattctgttggtacaacacttgtttccaactgattattcggctgactaatctttagataatgaggatggaattctgaccgctcaggactataagagactgttttcaagcctttggtaggacgagtatatggcaacaaacgaattgaacaaaaatctccttttgttcctgcccacatagtaggctgatgggacaaacgaaggcctctaaaatgtttagcttcaggatgaaaccaccaattatcttcgtgggtttcaacagcaaaaaaattcattccaaatggcaaagtggtaaaaggaaagcaattacctcgtgatagttcaaatgaattgctcgttgcgtgacgcgtgtcgatttggttgatgttcattgataaaaactcccttaataaatttttattttttattttttaaattactcgttgcaatataattctgtttaaacttgtctttcattaattcaacgcacttcatccaaattaacttttgctttatggtctggtgtcaataatccattaacctcttgttacacatccgtcaactgcaagtaacaatagcccgtaatgtaagagattacttgaatggctttgtgagttttttcaaatccatttataaattcaacttccattttcaccctagcttgagaagtgtaagtaccccgatgattttccatgtaaagatcttggaacggcttcttcactatcttcgattcgttcgtacagtttttaaaggtaattatccactcacgttggttgaaccgtggacatccatgggagttcattgatgattttacatcctctaccatttctctagttggaccgccatcaccattactgaagaagaccaataaatcagcgtttagcggtttgtcttggtagatgtagtaagctcgacatcaatgaatgtaggtaattgtacccattataagtcgccctacagccttcatccgaccggagatcatagttttcattcaccgtcgtaatgaaatagaccaagaattcacttctatcaatttattgacaattaaagttatcctgaggcatgtcgctggtttcattccagctaattttagtggtcctaaaattcttgataccaaagttttacataatttgtggcaaggatgttgtatacccaaagacatctggcaaccatagtactgttttttggcattaaagtgttttcctaagcaatccaatcaatacaagaattgtcgcgtcaaaatttccgcaatgtctgttttcatccaatccacaccatccacatcccagcgaccttcttgaatatgctgtttgatttgttaaaaaaatttagagcggtcttctttaatatattgataaacttgaggtgtactgtgcataaagatatagtctggatagtcttttagtaagcttagctcggtagaaaaggaacgagaagttttttccacgtatgagctaagccccataatcaagtcacatcattatggttacttcccacaacagaaacggtaaatagtttcttttctctttcatgctctttaatagaggcctgaatcatggccattgcttcttttgtctttccagcaaagatggttggagtcatcattgccaaattgaggtaattgactatttacttaatgaattttaaataggattatttgatagactaatctttggcacgcttagcaacagcttgatccatcgcatccaggtaacggatacattcatagacggtactgtaaaatttaccaccatgaataccccagtaggtaaaagtagttacgggttataaagtagtattgtggcttaggccggtccaaaaacaactgacatcttgacgtttttttcggaatagctgtaatctaatatgatatccgatggttagaatttacgctttactcggcgtgacatcagcaaaactatcgccattgtgaaaagaataccatttaacgtcttctgacaaagggttgtgcattccctgtaaatcatgcgtgctttcaattgcaaaacccgttttcagctgctcaaagcaagagtcttggatcaatcaaaactgtttgcgaagctttggtaaagtatactgccttcttcctagaaagtttatgtgtaaaaagcgattggtcagaccattagtaaaataccaaatagcattccatctgttaacatttttttgaacacatgtttactaccaatagcgaataaacacaactgctattagtttaattgaaccaaaatttctccaccggttccaacgtattgaatcactagcaactctgtttcttcagaactaattaattgtaaaggtagaatctgtccagtgtcatcctatatgacagactgggccccagtcgtcacataattcaatgcgatataagaggttaccttttaaccaggtctcccccggtttaattaagagtctccgtgacatatttaaattcaggggtactcaaatcaacaaaatatctttaaaccaatgaacatcctctttgcaagctaagtgtgttagtttggtactactcttatccgttaggtgctattacagctgataaccaagtacgatacacttcttctaatataggtgaatcacaatttgctgcaggctttccttaaagacactaacaccgctcttaaccaccgagatttgtaggtgtttttaattatcttcaatacctggcaattgttacaaatggaactaagacgtctgctgattgcgtaccccatcattccaccaagcggctatttgattgtaaggatcactttcattgcatacatatagtagggttccaccattttgtacccaagcatcaatctcactattgatagcaggcgcactgggtttcataaaatcataactcaaaacaaataatccaaaccgactagataattggctactcacaagacactatcatttcggacacaacgaatcggtatagcattttttactaatgatagcgccatgctataaaacatcggaaatgaatccgaggaataaaaatcaagtgcctctgtactcatctgtgtcgcaaaatatccctatctgaatagctcttcgatgatacaaaatcgaatcactcaaagctacttctagatgcaaatcgttattgtgtaaaaaatgatattgcggctctttcatatttcacaaagtctggaacatattgtttaattgagtacaacaggtttccaaaatcgatttgaaattatctactgccggacctttttccgtcgttcgagggtacaagctattaaagacgagatttggccacttatagagcttcatactggtgcactgtaggatggaatagcgaagcaatctccgtctcaaaatagtttttctgataaccttaccaattatacttcggattgttttcaatcgaatctgctaaaaaccacatttgtctattcggtcatttgatcgactcctgcatcaaaaaatattcgtcatacgccgtctcaaaagttaattctgtgaatttgcctcgatacatattcggcggctgactagttctcgtccactttttgaaaatatagccacccaacgaaggaatttcattaaatttaccttctggactaatgattttccattgagtgtaattgatcaagctatagatggaaatatagattcgcatagcctgtgcgtattttcgctgggaatattctttgatccaatcagccgcctagaatagttcgagcatacagataagccttcaattccgcttcctaataatgaccttacaaatcttcttgtagtgaatgccaaggcgtatggcaatagagttagtactcctttttgaatcacactgagtaaccggaaaaagtccaaaaaatctggctcttctaaatgaatcacccatcactggctttaaataaactttctctaatatagtcggcagaagctatcatgagcacatgtagggggagtctcctccatagcagacgacttcgccattttacctccatcgcgcctcagaccaatggtcctaaccgtcctatttaccatagagatagtacttgtagtctcctaaagcaatccacgtcatcaaatgaacaacatatccatgtttttaaacttttagatgcgttcaaccacaagcggggcattgacataagtaatcacaaaatataagttaatatcgatagcgggattccaaggctcgatttcttgatagctggttaactcttgattttttctctagtgaaagaaatagtttacttctttaattgggtttgttctctatggatgattttcatttattttacagttcaaaaaatatccctgccgctgacgatattgtaatgtctcaaaaagttagttttcttagtctaactttgggagcgcttcatattggttctattcggctgggctattttttatcaagctgcttaactcttgaggtatcgcctaataacacatcagtacctttactcattttgtcagttgttcataaacaaatattagaaatttttttatctttaaagatggtcggtttaagatttcgtaaaatgatcattgccaatataaggaattttctcttgtaacctatcaaagcgtttcagcatcatccccataaaagaatatgctggcaaactaatacctaaaaagagcaccaataatggattggttatatacaacaaagcagcaacacatgccatgatcactgttactacagactgcaaaggattaataaagagaaataagaatggttgcaaccaaatcttactaccttgaaggtcaaaatggacataaaccggaaacaagaagattcctgtcattacaaacaacattcgcgttgccttcaaaacaagttgcaaaataaagtcatcctgaccagcaccatttatcaaggctgtctcgaaaaataccaccacaactaaaactacaaagccgatggtaattagtaaactttctttgaaaatatcatgataaccttctttaaattccgcataaatcttactctcatattgatttcgtaaacgattacgaatacagccaaaaacggttagtgtagctggtactacaccaaatatgacacctcctctaagtgtaaacagtatccataaaatgttcaacttcatcatatagtaaatgtcattaataatgactagtaatttatttacaaccattgtaatctaccccttaattgcacctaccatgatgcctttttcaaaatatttcgctactactggataaaacaataggactggcaatgtggacacaactacaacactgtatttcaaagtcaacttcagcatcattgtttgggcacttgcactatccaacaaagcctggctggtatctccaaactgaccttgtaccaagatttctcgcaaaactaattgcaacgggaatttggaacggtcttgcaaataaatcattgcgttgaagtaatcgttccagcgagcaacaccataaaacattgccattacagcaataattggtgtggacaatggtaacacaactttccaaagtaactgcatatcattagcaccatcaacataagcactctcaataagttcccccggaatattttgttgaaaataagtacgcatcaaaatcatgttataaacacttaacgcccctggtaaaatcatgacccaaatagtgttaataatacctaattgctggtttaccaagtatgttggaatcaatccaccactaaagaacatagtaatcgtaaaaaagagtgtgaaaagtcctttcccacgaaattcaacgcgagacaagggatatgcacctaacgtcgttacagcgatatttaccaatgttccagaaaaagtatataacacggcatttctaaatccgaccaagatatcatcgtttttaaggatttcagtatacccgtctagagagaatcctctaggtgttaacaatagtggagtatcaaaaatcttcgtcggatcactaaaagaagcattgactacgaaaacaatgggatagagaattaatattgtgaaaatcagtaaaatggtgatattcacaatatcaaaaactttgtctcccttagatggtcgatatatagctttagttttcgccatttaaactcaatcctttcctatctcctaccacaaacttgtttcaccgacacgacgggcaaattggttaactacccaaaggaagatgaaattaataacattactaaataaaccaacagccgctgagaagctgtactcaccatttaccaaacctagtttataagtataggtagataatacttctgaggaagccaaatttgaagcgttttgcattaagaaggtcttatcaaagccaactgccatgattccaccagtagctagtatagaagaaataacgattgttggcataattgctggaatcgtaattttcttaatacattgtatacgacttgctccttcaagatacgctgcttcatattggtcttgaggaattccagacatagctgctgtatagatcaacgtactccagccaacactttgccaaaccccggaccagacatacatatgtggaaatgttttagcacttcctaagaagtcaatagcatctccaccaaacatttcgataatattgtttatcacaccattttgagaaccaaaaaagaagtttatcatccctactatgataaccactgagataaagtttggtatataagaaatggtttgaataaaagacttcaatttcttattactaatttcattgaacatcaacgccaagataatcggtaagggaattgaaaccaataaactgtataaactgattcgtacagtattccagataacgtttataaaaaaatatgattgaaagaagcgaataaagtgtttaaatcctacccaaggactagcaaaaataccaaaagctggcgaataatctttaaaggcaataattacgccatacattggccaataattccaaatcacaacaaaaaaaactgggattaaaatcattaagtaaagagatttgtgtttcttgatgtactgccaactctttgcccgctctttctttttaatttttttcgggctacttttcatatctgtacctcctcaaaagtgtatgaagcatcattctgctgattgataggagttactcctattaatcagttacggtgataagattgaacaatcacggcgacctttttgtcccgtgactgttctaacttttccaaaattttatagattgctggagtcatcttacatttttatattagaaacaaataaaataaaaaattatccaaagattcacaatacaacttcaacatcttactcttccatgtaacgagcatattgcgcttgacgtatttccacccatttgtccaaaccaatatttttcaattgagtcagatattcgtcccatttttcgtctacatcccatttaccagtcacgaattgaacccgagcttgttcaatatatttgttcatatctgttgtaatcgtagacaattctgaagtttcttctgacgtcgacataaaagttggtaaaataacttctggtagattttccaaaggtgcatctgtgtattcttctggttttcggccataggcaatttctttttcacgttcagttggttcattgtatggatagaaaccgccatatacattgtccatgaattggtatgctcctaattgaggaccttttgggtaattcaaaatcttgtcaacatatactttgtcgccattttccttcgcttcataagtcacaccttctttaccgaagaagccaagctctgttccttctggcccatagaaatagtcaacccatttaattaatttttctggatcagctgcatctttagtaataacaaaggagctagttcccatgacagatgattgggtaaccagagagccacccgtgccatcaggaccattcaaaatagttgttggaacataattgttcattgcttcagttccgataaagtcacgacctacccatgagaacataccaacagtatctttactagcatcagctacccatttatcataatccacaccagcaaaagcagttttggcaatcaaaccttttttatacaagttggcttcgtatttccaaacttccttcatattgttagaagagaagacaaattgtaatttcccatttttatccaagtaataattgttttccatggcagttcgaccagcagagttcaaaccaaatgcggattttaccatcaattctaacggtccaaattgtgcagaatccatatagtaaccttgttcatccgctttcccattaccatttggatccttagttacgaacgcttccaaaacttcttccaattctatcgtattggttggcacttctaatcctaatttttccaaccaaactttattgaagtacatcttgaaggaacgaccgccacccataggatcagaacaagtataaggtaaagaatagatgtgcccgtctggtgaagtgatagcttttttgatagttggatcttcttccattaatttaaccaagtttggtgcattatctttaatcaaatcttccagcgggataaacaatccttgttcgccatattttaccaactcttcatttgagaatcctaaattataaaaggcatccggcaaagtctttttagagataatcaattgtttcttatcttcccagtccttcacctcttcccagttcactttgataccagatattttttcatattcattccacatccaaagatcttctcgtttgggatggacgtcagtcctgtcaggtgccatcaaagagatagagccatcatcttttttcttacttgattctccagtttcaccaccacaagcagcaagacttaagagtgttgccgaggcaatagcagaacccactaaagctgccttccattttttcattactttttccctccatcataaattaattaactaaataaccaaaaaaattagaaatgagcataaattttattgttactatcatatataacacataaaaattattacccacgtaggttatatatcaaatagtaatgcctttaataataaatgtcaacgctttctttttttatggaatatatgatattctgtatataacattagaacaaacaatagttttagacaaatcaacattgtttttaatggtaatgataaaaaacaatttttattttaaaaaaagtctttatttctgctgtaaatatcagaaaataattatctttagtattttaataagctacaatattgaaaaaacttataaatttacactttattaaatgctaaaaaaatttagcaaagatataccacttaatttcttcaacagaaaattaaacgaactatgttatcatagtaatgaagaatttcaggaggactaatttatgaatacatctctttatgtcaaggtttacaatgacctgaaagaaaaaattatatctggagtttatcagattggggaaatgattcctacagaaaaagaactcacagaaatttacgacgttagccggattaccattcgacgggcattaactatgcttgcagaagatggcattgttgagcgaaaatctggtgtaggtactttcgtactagaagattgccaatcaggacgtcctaataaatttatcggcttgattttgtctggcctaaccgacagctacggcaaacatcttctacagtccatagtagcttccgctgatgcaaaaggatacgaattaattttaaaacttactgacgaaaattctaaaaaagaaagcgcattagtggacgaaatgattgcattaggagttagcggattattaatcgaacccgtacaacgtaatttctataatgcaactttaataaaacacatttatgccgactttccaattgtcataatcgataaagaactccaaggaatcgatagtctattcgttgggtctgatcattacctcggcgccaaagatagcgctcaaatgcttattaacaacgggcataaaaatcccgtcataatcggctacgctgaatttcgaaactctactttagaaaaacgaatcgatgctttcactaagacttattggcaatcaaatatacctttttccgctaaaaatgttgcacgaattatcactagcacttaccagtcaacagatatagatacatttcaaaaggatgtatattcaataaagaaaaacctacaaaaatttgagccatcttgcgtcgtttccctcgatgcccatgtgaacggacttgtacaacaagctttatgggagcttgacttacgctatccagacgatatttccttattcggatttgattctgcaaactcctcattcattagtaccaactatactcatctatctcaagatgaagaaactatcggtgcaaaaagtgtcgaagttctagacaaatcaattcgcaaagttcctatcaaggaccatcgcttattgattcccgccacactcaaagattttggaagcatcagtgtcttgaaatacaacctatagtatcatttagaattggatatagattcgcaaataaaaaactcgtcgtatgtgagaagtaaataggtgtgtaagaaaacactcagaaaattgaagcgacctccagaagttagacctaaaatctagcttctggggtggagatgtcaagtaaaaatagatacttagttaagagaataagtggaatatttttcaaagtctttaggagattgatagcccagggcagagtgcatgcgttttgtgttatagtaggtttcaaactatttaaatatctcaatttgagcctgatcaatatttctaaattgagcgtcattgatcagctctctttttatcgttttgtaaaaagattccattaaagcattatcacaagggtttccttttcggctcatagtagagcgttcttctattattcttagcaccgattggaatttagtacttgtgtattgcgagccttgatcagtgtgaataaccaccccggtccaggctgctcttttccaaatacttgaagaaaagaatccacaactaattgatctttcattctaagtgacatagtccacccaacaatttttctcgtatagacatcaataaatacagataaataaagtgctccttctttcagagggatgtaggtaatgtctcctaaccaaattttatttttttctgttgccttaaacgtttgattaataagattgggtcgtgaaagagagggcgattttcgattataatacttgtgtttataggtactgcctttagcataaagaccaagctgatggagaagctttcttacacgttttcgattaacaagaattccttttttatttaataattttgttattcgaatcgctccatatcttccatgatgttcctgaaaaatagtagcgatttcttctttcaagagttcattctctttttttcttttggatggttttcttttaaggaactcataaaaaccagcttttgaaacgttcaatgtctggcaagctctccggatattcaactcatttttgtgttcttttaaatactgaaatcttacttcttgtttggcttcaagaagacctggaacttttttaataagtctaattcctctcttaggtaacgattttcttgttcgagtttctttatttcataatgggcatcaaaaagtgcgctcccttttccggggaacgcactttctccatatttttcaacttcttgaacccatcgatacaagctattagcgtgaacttctagctgtaggctaacttctttaacagaaaatccttcttcagttaccagttttacagcggcgattttaaatgctttatcaaatgaacgtcttagcataatctagatcctctctttcccttaatttattgtctagtttattataccaagtccaggcgccgacctgtatcaagtacagtggcatgttctttaagtatttgaagcaaaatctgtccatcaaaaagctgtattctcaaagtgaacagggtgcgctaaatcaggtaatacttacgctgatcatttcttaatttacctacttaaccaaaatttaaatcaatatgaaagcgacacttttcaaactaaagaggtcttttcaccgcttgatgtttgcttcgataaaaaagttgatgtcggattagttttcattttaataaaacatactatttctgaaaaaaatttatccactgctaagtattcggatttttctaatttttaacaaaatttatttcggaattttctgatattatcttcgcaacattagtgaaaattcttaaataaattcattctttcaatctccgaattttagatatatgtgaaatatctgttttttgaatgtttgcataagttaaaagatgagcgtgctttagtattctttagaatagcttcttatacaggggcacgaaaaggagaaatactcgggctgacatggagagacatagatttcgataatcaaactatccgtttcaacaaaacgttagtagaactatccgatggctctctatgtattaatcctacaaaaacagacaaatcaaagagagtaatttcaattgataacggaacctcacgtattctaaaaaaatggaaacgttctgtaataaaaaagaacctttctagggggattcggatagataatatagatgatatacctgtaatcagcactatcaaagggaataaaaaaagggacttcctttacaaagtctaccctaaccatgtcatggataaagtagcacggaagttcccagatatgaagataatcaaagtccatggctttagaaagactcatgctacccttctctttgaagcaggtgctcaagtaaaagatgtacaagataggctaggacattcttcttctaaaacaaccacggacatttatattaaagtatcaaaaaatcggcaaaatgaaacagtcgaattatttgagtcttacatgaacggatgataagcgaggtcaaaaacggggtcagaggatattatgaggatacctttttccctcttaatcctttaatatcaatactttaagcttagacttttgcaatcttcccttgttcgatataagactcaaatcactatatcactagatatcaaacggcttcatacggagtcaaaaacatcaaatgtggcctgttaaatggtcattgaataacatttaaaatcaataaaacggagtcagacacggagtcaaaaacgctgagagtaaaaaaatatatacagccctgtggcactttacctatggggctgtatatttttttatttcatattacctgaaacgattccatttactttttatctcattttttcctactagttagtatcaaatactctcctattttctcaataaactattttcggctacatggtatctgaaacagctaaaaccttgtcattacagcaaaaaatcactttatctctgtttcatttcagatacatttcacttaagcggattccaaaaaaacaaaagaaaaaggaacccctagttagcctatgctttctattggttcctcttgagacacgttcatataacaacggggtagggtaaatgaatgaaaaagatggaggaatcattatttaatagctttcttaaatacttcgttataatcaattacctgcgcattattaagtatcacagaataatttttttcattttcaagtaacctaagcgggttgtctttactaacttactctgatactgcattactaactctcgttaaattagatagcaggtctgataaagactaatttcttataaaaatttttatatcagtatttataataattcctttaacttcatttacatgattaccgtttcttactgacataatcatactcggaagtctaatttgttttgaataatttaaaaaatgaaaattacttgtatactaatcaatctcaaactaataaggttaaactaattttaagtttgtgtagtgcttactgtctatatacattatttgatggctaaattcataattttcaatctctaaaataacttgaataaaatcaagagtttatcatcatctttgaccagaagaatctttctttttagtcttaattctcttttgtaaaaaagaattaaagacaacaatgagaaaccatctcaagtagtagtcttaaatttacattttatgagattcgcactataattgaaggaaataaaattaaaggaggaatcgtaatgaaatttgaacaaacaaaagaagtgttgaatcaactcgttgctgacttaagtcaaatggcaatggtcgttcaccaaacacactggtacatgcgaggacctggctttttaactttacatccaatgatggatgattttatggatgatttgaacgaccaattagatgtgatctctgaacgcttgatcacattagatggctcaccctactcaacattgcgggaaatggcagataatacacaaatccctgatgaaatcggtaactgggaccgtacgattccagaacgtttagccacacttgttgaaggttatcgttatctagctgacttataccaaaaaggaattgaagtcagtggtgaagaaggcgatgattcaacacaagatatctttatcggcttcaaaacagataccgaaaaacgtatctggatgatccaagcgcacctaggtgaagcacctcaggtagatccatcaaaatcaggtgctcgttattgattgatagagacaaagaatgttttctaatcaaaatgtacaattctattaaaatccggaactggaagtgcgaacttctattccggatttttttgcgttacactattagataatagaatttctcttttacttagagagatttgttactagcaaagaatgtttttgtgataaattggttttctttctcatgatttttaatacatttttacccccaaaaacaaatagactttgaacaagaaacatatgaagatgttcaaactcaaatcttttcattttgaattttaatttcgcggttaaaattatttaagatattatctatcaataccaacaaagatttaaaacctttcctccatattttcttgttaagtccttattctgctttagaaaactcatcaaaaaagagatgcaggaacttcggatggtggtttaggcttcttggctgggatgggcgcattagtaataacccaagagcaacaaaaaccattattttctcgaaagctatttaactagagaatactttagagaagttggcaaaagttgaattaattgtgctgccagatgttacgaatccgtaagtaggtgcgaaataattttttatgattaaaagagttgttcatggttaagcagtcgcaaatgggaaaacaggagtaaaagcgattaccgataaaattatagaatacaacaatcaaagtggcgctttaaatgagtctgatcaaatcattgattacgcaaaaaagcaaattaagagggaacaaaatgttcggtgtattaaaaaaaactgaaacagaaatattttcaccagtaaatggtctgcacgtgttattacatgtgggattagatattgtggctcttaaaggcgagggctttagcttgcttgctacagaaggataaaaagtcaatacaggggatattcttttgtcagtggacttagaagtttaaaaaaataatgctaaaaataacacattgattctggcttttcctgagcaaatcgacttgcaactttccgtcaatgaaggagtagtaacaaataaaactgttgcggtaactgtaagataataattactatataaaagttttctctagttatcaattcaagaaatttgtttgataatgggcgttagtcatgataatcaacatagcattacctccactattatttccgtttttttagaattcattgctttcttaagagcacgttctttttcttttccgtgcttactccattaataaatgatgagcgtagctgtgtccttcttttacaccagttaaaaactcagcagctttttgatcatttggataatactcaataggcaagtcgctcatagatacatctactagctcaatcaataaattctgaaaaccatcttaaagaactgaacttttgactaagccaattcacttgttgaagctgcaatagatagtaatgtctgatcaatatctaccgcctatacctgactcttcatactcggtaaactgtaagttcaagacacccgtcagtaataaattcccaatatcagaagcaatatctaataatgcaacagtttttttgtcggtaaataactattcaatcagatagaaaaacagataactaatgatatcggctgttaactgatgattcggccgtaaattctcttttttacttccttttaggagtaaaagctgacttaatttttgccattcttctgattctagatgcgttttttatttgctgataaatcttcatcactctttggaccgtctatttatctggctaccatcaattactcgcacttgatgattgtcaatcaaattctcagcgttttcaatatacgcgtctaaaaaaatatccagtgcattttaaagcagtcggatagcttccacgtttaatgtaaagacttgttcaattttttcaggaaatatcccgcacctcatttcagaaaacaaactataacaatttttatacctatttaattctaacgaatatttcaggagattttagtctatttagatgttttcagcgcttttgtttgtgaattaaagaacaaataagttagttttaaagttctaagaaaagaaaagagcgggacataattattcaagttatatcacactctcgtataatcttattaaacagcacagaagaaacacatctccacttcgttttgccctcaacaactgctacgcatgaaatatattaaaagtgaaagctaggtaaataagttgaaattgcattgaaacactattactgaaagaaattgatgttgaaacataccaatatgtgttgaaacttttcttttactagcttgtcataattttgcgtcagttttcctttaatagctgttgatgaatttggtagactgccccaatcattcctgcatcattttgaagcttcgcaggtctcactttcgcaatggtttgttcttttaaataattaatggattcatgtcgctgaatcaactcaaaaagacgttcctgaagtcgcttgttgaaggtttcattagaactaattccgcctccgattaatacaacctcaggatcaaagcagctaattaaatttagcagccccacagataaatcagtaaaaaaacgagagagtatctcgttggctaacgcttcacctgatgcttctctttttataatttctctggcatcccagacatcttcagacgctgaatttctttttttctgtgccaaattgtattgatagcataaaccacctactgttgcggcttttttgttcaaagagacttcttcaatatctcctgtcacaggaatctcatcaataaggcaccagccaaattcgcctgccattccatgacttccacgaaatacctcgccattaatgattattcccccacctattcccgttcctaaaacaatgcaaaggtaattatccatgcctttagcgttgccaatccagcgttcagcaatcgcagctgcatttgcatcattttctatacttacaggtaaaccggtaagtctttccagttccaccttcatattcattccataaaatggtttgatggctcctgccgttaacataaatccatctttttgaataattcctggtgcgctaatgccaattcccttaattgttgaataggttcgtttgaagccctctacaatctcgtgtaattcactgacaaacgtagggaagtcataatttgtgggcattgattttttttctaaaatcgtccccgtttcatctaataccccatattttacatttgttccacctatatcaaaccctacgtacatattctcaacttctctcttcggtaatatcatacttcttaaaaacgttcattaaaatgttggcattaataaaaataacggttccgataccagtgaatagccaaacaaacaataatttaggtaaatagattggtacaataacgactcctccgatagtaataaaaaacacaataatgctttgtggtaaatgtttaagcgacaaaatcattgcatttacaaccgttccagacaacgaattatcaaatcgagcaatcaatggaaatagatagagactcatcagtaccaaaaaagtgataaataccattgtaaggtagtaggcaattttatttcccaccataaagctttgtacgtatggaaaagtccaaaaacctgctccgataacagccagtatcaacacccacagttttgttgccggaagcatatttagctttagctgccgtaaatattctttatacagcacaccttcactatgatctatcatcttataggcagttccatatgcgctcgccaaagccgcaccaatcgtcaccacaggcaagcaggagaagataaaaatactattcaaaagtaaaatttgataaattctttccattccactataaatttttccttctgtactaaaaattttcgacatactcctgcctcctcatttgttgtcctttattatctactcaatcgtcttacaaacctaattttttcttattttcttcaattttttcattacgaaccttgtttacatcatcaattttattatctttttggaaattcttgtagtcttccagcaagctatctaattctttttcatcctttgctctaagcatgcccactaaggttgtactccaattcgtttgaatggcgctcaatgcacgcgcttcttgtgttccagcatccggaccaatattttctgttgggaattgtgatgtaagtttaccatctccccattcttgcatttgtttcacagcatctacataagaagcatcattcatcgctttgaaacggtcatgaccaaactggatgaattcacccatacgatactctaattgccatttttcaggatcatcttgttgaatttttcttgcttgctctgtccattgtactttattgtcagcttcaacagtatatgtttccccttcaataccaaagtttgtcagcatttctccttcatcactcaatagatacgtgaatagttgaatcgcttttgcagggtccgcacagtctttaccgatatagttaatcatccatcctgaaattcctgcttgtgttaatgttggcttgtttcctacagtactttgaattccatctatagcaatgtattcagcatctggattgtttgctttaaatgtttgcaatgggattccttggttaacaaaagaacccagcatgaccgttgcatatttacctgtttgaagtttttctttaaatttatccccatcatctgtaaacgtgtcatcagagatattgccatcttcatgtacttggcggaatgccttcacccagttgatatagtcttcgtctaaattacgatcataatattttccatcttttgtataaggaacacctaacatatcttgtacaacaccatccatagagccattagatgagccatcttttgcaaaatcattgaagccaaacggaattaaatccggatatttctctttaattttactcatgccagctgcaaagccttctggtgtagtgaaatctggttttccaattgcttcatacacatcttttctgattacgaaggcatctcgtgcaaagatgtccccactatcaaaatcactttgtgtatttgaataaccaggatagccataagattttccatctgataatttataccagttcaacgtttcttcacgagttacttcattgaaatacggatcgtaagtttttgctaaatcttgtagtggcaatgcccaagagtctgctttacgggcaacttgagaatttgaatcaaaaatcgttacgatgtccggcatatcccctcctgcaaaataggtatttaacttggtgtcatctcctgtaataaattcaatatcgatgttcagatcttctttgattttctttgttaccatatcttttccatattcggtgttccaccagtctgcattaacataccattttaatttagtcgtttcctttttcgtatctaattgccaagctggcgtttttgcatctggtgtatagcgatcttcaatagatggtaaacttacctctttatcttttgacgcctctttgttatttccacaagcacctaataacatcacacttgccaaagcgagtgtccctacaattttcttttttgataacttaaacatttccttctcctcctattcttttactgccccaagcatcatacctgagataaaatgtctttgtagcaatggatagataattaaaattggaacggtcgtgacaacaattgttgccagttgtacccccttagatgttgtgctgatttcgaccgctgcatttaagccttgttgagatgctgcctgagattgcgttataatttcgtagagtttcatctgcaatggataaagcgctctgtctgtcacatatagcttggttgtcataaaatcattccattgccacactccatgaaatagggcaatcgttgctaaagcaggtttagataatggcacaaatatttttagaaagacgccccaatcacttgcaccatcaatcttggcagattcctctaaagacgtaggaacatctctaaagaaattcatcaaaataatgacatcatagtaacttaataaggctgggataatatatacccaaaacgtatttaacaaatttaatgatttaatcaatagataagtaggaatcattcccccagaaaagaacattgtaataattcccatggtggaatacagtccgcgacctttcaaattccgtttagataaagcgtaagccataatcgcacaaaaggctgtatgtgcgaaaacgccaatcactgtttttcctatcgagataagtaatgcttgccacattgatgcatcacctaatacttttctataattatctgttgcaatctctgaaggccaaaatacaaagtctccttttgctagcgcatcactggatgcaaaagaagaagcaacaatattccaaacagggacaatgataacaatggtaaatactaacaataataaaatattgacaaagttaaaaatcttgctgtctttatcttgaacgacattactctttggttttgctaatgataagctgctctttttcatcgtgtccctccttaaagtactgattgattatcattcagttttttcgtgataatatttgttaagaccaataaaatcaccgagataatcgagattcccaatcctacagctgttgcataagaaaaatcaccttgcattaaccctactcgataaacataagagttgatgacttctgcttttggctgattttgtgaattcattaagactaatgtttggtccagatttgagttaaacaacccgctgacacttagaatcagatttaatgaaataatgtttcgaatcattggaatagtgatactccagatttgacgaagtctgctggctccatccatttttgctgcttcataataggtaggatcaattttagacatcgttgccagatacaaaattgttccccatcctgcttctttccacacatctgacagtgaagcaatccaccagtacttgctgacatctaacatatgattttgttttgtttgaattccaataaaattcaatagttcattaatcattccattagaagaaaaccaagtaataatcattcctcctaagataatccaagataaaaaatggggcagataagagatagtttgtattactcgtttaaatacgctgtctcttagttcgtatatcataaccgcaataataattggcagaacaaatccaaaggctagtttcaatccactaatgcctaatgtgttaattacggactcccaaaaatatttatcctccatgataatccgaaaattctctaaaccaacccactgtgcaccatctattgtgtctatgactgtgtaatttttaaaggcaatcactaagccataaatggggataaaactaaaaataatcatgtaaataatgccgggaatggccatggtttgcagctgccattgatgaccaaagtctttccaccattttgaaaaacgactggttgaggttgcttttgcgttctttgcttccaccctttttcctccttctttttgcttcattctttgcttatatctaacgactcaatcgtttagttgtttctcgtaccactaattgacaatccaaggtcttactttctccttttttttgattgttaattaatttcatcaactcaattactgcttgttttccttgttcttgtatcggattttgaatcgttgtcacacttggcttaaagtaacctagcagttcaatatcatcaaatcctattacactgaaatcctctggcacgctcattcctagctcatcaattgcctttatgacgccaatagcagacaaatcatttcctgcaatccatgcagttggccatttatctcgtggggtcgtcaataaataattcttgatattttcatagctctctttttcttcaaacaagccggtaatcgtccagtcgggatttattggcagttgatgctcagccatcacttcctgaaaacctagataacgttcatcactgtcataaacattagggtgtcccggtaaaaagccaagttttgtatgaccattttcaattagatgctgtgcagcaattcgacctgctttctgagaatcaaagaccacactgctaatacttccatcattgattttccgatcaacaaatacagccttcacaccctccgcacgaatcgtactcaatgactcttcatcgattaattcttcaaatccgataaatccatctaccatatttcctaataagtgagagctaagaatctgtttatccgaggaaataagtacgttcaccccatattgatagttaccagcttcctcaacaattgcttcaatcaacgtattgaagtacggacccgttatggtatgggtataaagcccaatcatctttgttgtttttgttttcaattgttttcccattaaatttggggtgtaatgaagttttttcgcggcttccgtcactcgttctatggtttttggtgttactacatccagcccgttgagtgctttggagacagtcgcaatggaaacattggcttctcgtgcaacctctcggattgttactcgctctttcatgaaatccctccaaataaaaacgtttttattttcagttaataaaaaaagaattctttttaatttatagacaaagtatagataaaaacgttttcaaaaacaatatctaacagcaagtctggttgctcaactcttcgttttgaaaaaacagtcacggtggtacagcctgtaccaccgatacacctatcctacgtactcaaaggtagctgttgaaagttctttttccgcactagtacctaaaaataaatgaaatgttcctttatctgttgttcgagccaaatcactatgcacataagcaaaatcttttgcctcaacaacaaactggacttgccttgtttcacctggatctagagatactggctgccatgcaagcaattcttttttcggacgaatgatttgcgtaaatgcatcttggaaataaatttgtggcaacgtatagcctgcttgattagatagatttgagacagtaaacgataaagtaagttgttcatttctagttaattgcttatttgaaagccttaaatcagaataaacaaattcactatagctaagtccatgaccaaatggatagagcggaccattttcttcatctaaataacgagaaatatacttttgatctgcattttctgcagtctttggacgtccggtagacatttcttgataagaataaggaagctgaccgacacttcttggataactcattggtaaatgcccgctgaaatttctctcaccactcaacaatgaggctaacgctgttcctgtttgacttcctaaaaaccaagcagagacaattgcttttacttttggttctacttctgttaaaacaagcggtctgccgctaaacgtcactaaaatactctctgtattctttttatagatggtttgaataactgttcgttctatttcacgaagcgtcaagtcagttcggctagctgcctctccagcttcttcacttgtttctcctacagcaatcaccactttatctgcacggctggctgcttcttcgattgcctgccagtctggctcttcatcggtaatcggaaggatttcaagtgttgaaacgatctttttcataccttctgataaagaactcgcagcctccatctcaccaatccatgaccaagcacctaatacatcccttgtcaccgcttttgttcctaccaatagaattttttcttctttttttaagggaagaaccccttcatttttcaaaagaaccgcacaacgaactgccgcttcataggacgctttcgtcaactcttccaaatcagcagtcgtatccaagccacgataaggattttcaaacaaacctaactcattttttaaggataaaacacgccaaacagacgcatctaacgcctctgttgcttgtgtttcttctacaatcgctgccagttctttcaggtagcaatccgtcatcatatccatatctaccgacgtttcaaacgctttttgtgctgcttgttttgatgtttcagctattcgatgcgccttcaattccgcaattgctgcccagtcagaaattaaaagcccttgaaagcccaatttcctctcaaaacattttgtactaaagaagtatttgcggtaacaggcaccccatgtacactattaaaggaagtcatcaccatttttacgccttctgaaattacgccttcaaaagctggcaagtaattttgatagagctcaacatctgaaacatcgactgtattataatctctaccgccctcagctgcaccataaccaataaaatgttttacacatgcagctacgtgtgactcattttttaagttctcgccttgatagccacgaacatacgcttttgttaacgcagttgataggcgcggatcttcaccgttactttccaagactctcccccagcgtggatcttttacatagtctgccattggagaaaaagttacatgaatctcttctttcgctgcttcttttgcagcatgccgtgcaacattttctattaattctgaatcaaaagaagaggctaaagctagaggaataggaaaaatcgtttcatacccatgaattacatctgccataaacaacaacggaattttatgcctgctgtgagcaagataattctcttgaatctttctcacctctgttgctcgatgcgttcctaagacagaacctaattgatataattgttcttcatccattgaccactgagtcataggaccggtcacttcgccttgattcccaaaaaaatctggagtcacttgcaccaattggccgactttttcttccaaggttaaacttgataataattttttcagttcttcagttttcatctttattcctcagtttgattcttaatcagttgtttataccactcaaaagaatctttctttctacgtgctaatgtcccatttccttgattatctttatccacatagataaatccgtaacgtttttccatttcgcctgttccaaaactgacaatatcaataattccccacggtgtataccctaataattcaataccatcaacattcactgctaaagccatttggtcaatatgtttttgtagatactctactcgatacggatcatgaatttttccatcctctaacttatcataggcgccaaatccattttcaacgataaacataggtaaattgtaacgttcataaatgatatttaaggtataacgtaagcccacaggatcaatctgccagccccaatcacttgcggttacatatgggttatttaccattttcgcaccaggatattcttgaacaggctcaccctgaacatcctctaatgtagtcactgcacctgacatgtagtaactaaacccaacgtaatcaacctttccttctagtaatgcgctctcttctttttcagatatttcgatggtataacctttttgctgccaatacttgcgtgcataagaaggaattttcccacgaacatgaatatcagagtaaaagaagcgacgattcattacttttacagaagccattaaatcctcaggacggcaagaatacggataaacaggaacgtatgccatcatacagccgatttggaaatctggatttatttcatgtcctagcttcacgacttttgcactagcaattaattcatttagtcctgcttggaaagtaatttcttccttattctctccttcttcaaaacgaatagctgaatttgtccatgtgtgtaaatcatgctgaccgtccgcttgattatttatttcattaaaggtcatccaatatttcactttgtctttgtatcgcgtcatgactgtttgggcataatgaacaaagaaatcaatcacttgcttatttctaaatcctccatatgtttcatacaaatgataaggaatttcaaaatgagataacgtaataacaggttgtattccattagctaataattcatcaaacaaatcatcgtaaaattgaagacctgcttcatttggctcactttcatcgcccaacggaaaaattcttgtccagttaatcgatgttcgaaacgctttcaatcctagttctttaaatagttgaatatcctctttatagtgatgataaaaatctatcgcctcatgattcggataattttctccttcaagaaccccttctgtaattttgcgagcaacaccattggctcccgcagtcatcacatcagcaatgcttacgccctttccgtcttcattccatgctccttcgacttgatgagctgccactgcaccgccccataaaaactcttttggaaattgtttagtcattacatgttcacctcgtttagttgttactcacagtataggggctgattttttgggtttcaatattctacagccactctggttaaacagtaagcaaatagaaaaaaacaccacgttggtacatgtcgtaccagcgtggtgctaaaatattttttcttttaggttttcactcttgtaatctattcgctaactgctcaattaaaaagatgcatggaatctgactcgtcaagtcttcatgtttttttacacgctttatatctacgtgataatctaaaacaaaatcggacattttagcaagcggagaattaatatcagccgtaatagcaactgtcgtgaaatcatctttattccgaaaaccattcacaatctcaacaacctcatttgtcattccagaaacagataaagttaccaaaatattatcgcttgtattttttaattttgacagaattggatacgtaggatcaatcagagcagaactattatagccaatcgatgcaaaccttcgagcagcatattcacaaatagaacctgaggcaccaatcccaaaaaagacgatattctcacaatactgaatcttctcaataatctgatttagcttactttcaatgtttctaggaaaatgatttctgcttaatatatttaacgcatcatcaaatcggtcactttcaacagattctacactaaactgactgcgaaattctgtatagctttcataacctaatttacggattaatcgcatcactgaagaagcggacgtgtgggattcttttgcaatatccctcaatcgcatataaggaactttctctacattactactcatatagtgatagattgcctgatccgtatcagataatgaattaaaatcaatatttccaaagaaacccatgttctctcccccgttttctataacgactacatgaccattactatatatcattctagcaaaaaatactagattttacgaaggttctgtgggaaaaatcattccctttaactagtaaaaatgattgagaaactcttttatgaaaatcgggtactcttactaagatcaataacatctttttacaaaaaagagcagaaattataagttgattagcctatttcgactatttccaaagctcattctttttgatccaacgtgagatggctgtttgtgagcccccatattctttgcataaactggattgaattttcccgccatgataaagattagctaagcttttttgaaatcttcatcatattttttgtaattggacataaacgttcttccttatatatttagattactcaattaatcagctatttcgttttatttagctgttattctatctataattgagttagactctgtggactagtacgttctccaccagattcctttggaatactgttaatgaaaggctctagccacatctctttgtcaaattgttaataagtttgttagcgcttgacgtctgttcgtgacgcttgattgatcacaaggttacatggcaaagagtgagtggatcacagcgtgaattttatctgattaggagtgatacttatgttgtatgttggaatagatgttgtcaagcataaacatgacttagcggttattgacacaaaaggagcgatttttattcgtcatcttcagattaaaaacaatcgtgaaggctttacgaagcttcaaatgacgcttgctaatttgcagaaatctaccggtgaagacattcaaatcgccttagaagataccgatcattattgctttaatatcttacgcttccttcggacgcaaggctacccaacctacagctataatccgtacttaattaaagaatatgtcaaaaatcaaagcttgcaaaaaaccaaaaccgataaaaaagacaccatgacgatcgctcgaaaaatacgaacagatcttgataaacaatcatttagtgctaacccttcaataattgagttgaagtatttaactcgacatacagccagattgaaagaggattatactcgaaaaaaagtaagctacacacgaattctagatattctctccagaactcacaccttctttgggttcttcttccgcgaaacaccaatcctatgtatacgcaatcttaaaagaatatccctctgccaaaaagctaggaaatgcacatttaacaaagctgactaatcttatttcagcgcactcaaagggccgctttggaaaagaacaggcggtcaagctcaaagtactcgcgcaagcctctattgatcaagagtccgccgtattagaatttgaactccttcaaactattgatgccattcagtatcttacaactatgcgagacaaagcaaagaaggaagttgctcgattaataagtgaaatcgattcgcctattttaatgattcctggcattggctataagttagggagtgtcattctcgccgaaattcgggatattaagaattttcgttcgccgaatcagctgcttgcttatgcaggtgcagaaccttccgtctccacttttggaatgaatcaaacggaaactcgacgaatgatcaaacgtggatcttcgcaattacgctgggcattgcatgagttcgccaggctcatgtctatttggtcgccatctatgcgtgtctacttccagaaaaaactagcagaaggaaaacactacaatgtcacaattagtcatgtcgtaagaaaacttgtgaggattatttatcactactgaaagacaataaacattatgagaagcagaaaatgatcattaactgatcttttcaaaaattccctttgcctagggtttctttgtcatgccttcaagccatatccaaactacgttattcagactttccatattgtgcttgacttaatatagtttgtctctcttttaggtgtcttaggttcagaacatttccaacaacgaatatctctgctagtgaagtcctgaaagcagaaattatggctaacggacttgattcaagttctgaacaagtaacaatttcagaaaatatgacaaaggacgaagtgttacactcgatttatatagaatttggtattttcaaagaacaagctgaacaagacattttttaaagcaacgcccgagtaaaacgtcaagcaactgataaaagttttgttttagtaagagtggctggcaaagccgccaaattaataatagttttgaaagcggaaccgcatatttttattgtaaaacaactgaaagtggtggttttagagctattaaagaaattattacgccgactttaattatcataagtatggtttttcaggaacaggacagtatggacttcccgatcctaatcgtattcactacacattaaacagagccttatacagtcatgcaacaacaagtattgcaggtggtggcaatgtgggtgtaaatggtgtaggaactgttaatcttagtgcaactgtaacaagcaactttatagaaaatgcttttgtgaccaaagattcaatgagttgcgtatccgtgaaatgaataagcttcgtaaagcaggacaaaaaagtcaggcagaaaaactgaaaaagaactggcactttccgctaaaaaatcgtgcaaagcaaacattaaccattacgaatacaaaacatggaaaagttttctagcacctaaatgcacgtttctatatgaagtaataatgattgatcgattttttggcttttccacgctctcaaaggaggcagatctcttttttcatgaatcagttgaagcttttcaagacaaagattccgacttatttttctccttattggcagaacttcccgaaacgttagataacggctttcggaagaagcttcaaaaccttttgacctatgaataaagcatcacaaatgcgatgatctatccttcctccaatgaaaataacaaaaattcctgtttttctatcaattcatatttatttaagaactagtttagttgattgaatatgccctactttttttgtcctataaatcttgtccgaacatattgttcaggtgcaaaatgaatctctgtatattcaaatatttgaccatcatctaaataagcccagttttgagttagtccaatacagttttcttcctgtagagctaaataatttttatctaaatcagttgctaaaattattctgtcaactaaacgtgagccaataattttatgatttgtgacagcctgaatgtatcggtaaattgattgtcctgcaatctcccttgttagtctaggtactacatctgatttgaaaaagctatcatctatcattacaggttgtccattaattagacgcaaacgaacaacatgataacaagtagtccctacttgaaacattgatcgtgatgcaagtgcagaatcaacaactattaaattcaacgaaagcaccttagtttcaattgaatctgtttgaatttttgagccacgtcccatatttccggaatcaattaataaatcttcaacaactactctttgtaagactatattagcactaccaagtttactgtatactagcccctcgccgtttaactgacgaattgcctttcggattgtattgcgagaaacgttatactctaactctaagtttttttctataggaaggatttgactttcatcaaactctccatcaagaattctcatttttaagtcttcatagattttttctgccttattaatttgaaccattttatttttctccaagaatcgaataattttttagtatataaccttccttctttatcatacaaatagtttgcgaatctgtaaataacttcaattctttaagacgagacgcattaagcgaagacaccttactaagctcttctgacatataaccaggatggcagatcacttcaacaatagaactattagcatcatcactacttatttttaaactttcatataaataatttagtgaataatctattccagcaacatttgcaattcgcttatcaggcatttttatccctgcattagttaaatagttatttattctttcatttgaaactctacgaacgggtacaccataaaaccgagcaattttaataatgatgtccgccattctataatcaattattatattcttatgataggttaagtgagttaacattaatccttgatttaacagatactcacactgagcaaaaaactctttttctatccaatcataatattcggatgttcttaccactattgttttattggggagctgacttccatcacaacatgaatgacctatctctaagttcaagtgaatccccatgtgctttatttgattcttttttgctaatctagctgcttcaacgcgatactctgatgtcgtaataaagtttgtttctgttattcctccagttgataagcccgcaataattccttctgttacactaggaactaaaccaaaatcatctgcactaacaattaagtaatgttcagttctcatgtgtaatctcttctttatacaaagcctcatctgcagctttaaaaaatggataataaattaccgtatcaattaataagaaaaatatttgtaacacacctaatttccagcttccttgtagcaacccaacaaaaaagatgggaataggcatccctaaaatcgatgctccagaaggtgctggcactagaccaattttaattacaaaatagccaataacaagattaattagtggtgcaatgatataaggtattgcatatagggcattaaaaacaatgggaataccaaaaattagcggttcattaatcccaaaaattcctgaagggagagataacttgccaagagttttatattgttcacttttagattgaaaggccattaaaatatttagacctagtgttgctccacctccacctatagaagtacataagatccaaaaagctaatccaacaatatttggaagcgggtctccattattaaaggcttctagattttgtaaatctaaaggcatgaaaacagttaacaagattggcatcaatacaagcattccatggatacctatcatccaaagtaagcgagagagcaatgttattaatagtaatgcccataaagaattacctatatttgtaatgggagtttgtataatcgtaaatataacctgatgaatacttccaaaagatgttaaagaaaataaatatcgaacaatcatagctaaagtaactatcacagctgaaggaaataatcctgcaaatgattggctcaccatgctaggaacggcatcaggcatttttagaatccaattatttttaatcatttttgtgtaaatgctaccaacagcaaatgctgtaagaatggcaacaaaaaatcccgcactccctaaccattcaaatccaatatatgacacttcttctacaactgataatggtgtcatgatgaagaaagcaattactgcaataacacttggaataatcgagtgtatgtcgtatttattaacataagtataagtaatactgataaccgcaattatcgaaataatactagtagaaaattgtccacccattgaaaaaatagttttaattccatgctccgaaataaaattttgataggaattaagagggaaatttgcaaataatgatgaaaaagctcctacaataataaccggtagaatcattgttaaacctgatgttaaaatttttaaaaaagtaaaactgtctaactttgcattaattttctccaaactctgtataaatgtaccatctgctttaaacatttaactctctccttttagggttaaccttttttgattacgtttacatattaggttaacccaatacatttgtcaagtttttgattacaaaaaattgatgaaataatacttgagaaaatgaaaaagatcatctttttgatctattaattaatcaaagtgacctagaaaaaatccgagtgagaatgagcttccttctgacccagatttgattttgcacaactcatcagtaccaaataaaaagagcatctttttttcaacaaataatccgctctaaaagagcaagacaagaaggaataaaatttaagtcatttatacaaaaacctggataagaatcaatgtttttttttaaaagatatatttttaatttaattatctttatttaagtaaaacgctataaatgagtgagagtgtaaaatattttgtgtaaatagaaaaaaggaagtcccttctgtagaatagagttaccacaacacattcacagaagagaggacttccctatgaacgattttactacagaaattctaaagactctagcgaacaaaggcgatttgaatgaattattccgtgtccatttggagaaagcagtcaatacgcttctcaaaacggagttaacggctttcctagattacgaaaagtatgatcgcattggttttaacacgggtaattctcgtaacggctcctatgaccgtacggtcaagaccgagtatggggaacttcatctccagattccgcgcgaccgcaatggtgagttcaagcaacagactgttcctgcttatagacggacgaatgacacgttagaggagaccgtcattcacctcttccgaaaaggtattaccatgtcggaaatcgcagacttgattgagaaaatgtatgggcattactacacgccccaaaccatgtccaatataacaaaatcatttacagaagaggtaacggcgtttaaagggcgggagcttcatgaccgttatgctgctatttatatggacgcaacgtatattccgttaaagcggaaaaccgtcgccaaggaagctattcatatcgcagttggcattcgcccggacggatcaaaggaagtattgagctatgcgattgcaccgactgaatccatcacgatttgggaggaaattttattggaccttcaagagcgcggtttgaaaaatgtcctcctgttcatcacggatggcttaaaggggatggtaggagcgattagtcggttctatcccaaagctcgttttcaacattgttgtgtacacgtttcccgtaatatcagtcacaaagtgcgtgtcgatgatcgtaaggaagtctgtgatgattttaaaatggtgtatcaagcctcatctaaagaggtggcgttggaagcacgtggtgcttttgcggaaaaatggaaaaccagctatccaaaagtggttgaatcgattctttcgaacgatcacttgctcactttctatgatttccccttggccatacgcaagagtatttattctacgaacttgattgaatcctttaataagcaaatcaagaaatacagccaccgcaaggaacagttccaaaacgaagagtcgatggaacgtttcttagtctcgtcttttgatacttacaaccaaaaattcctaggtcgcagtcataaaggctttcaacaggccgaaggcgaacttgaacaaatgctaagccaactgattgagaattagaaacaatctgcagtagggaagaatcatttacacaaaattattgacgctcccaaatgagcatcccaatattcatttattaattattattcagcttatacaaattatatttcctacttcttatagactcaaatcactatatcactagatatcaaacggcgtcatacggagtcaaaaacgctgagagtaaaaaaatatacagccccataggtaaagtgccacagggctgtatattttttatttcagattacctgaaatgattccatttaatttttatctcattttttcctactagttagtatcaaatactcccctattttctcaataaactattttgggttacatggtatctgaaacagctaaaaccttgtcattacagtaaaaaatcactttatctccgtttcatttcagatacatttcacttaagcggattccaaaaaaacaaaagaaaaaggaacccctagttagcctatgctttttatagattcctctcgaaacacggtcatataacaacggggtggggtaaatgaatgaaaaaggtggaggaaacattattcaatagctgtcttaaatacttcgttataaaatatgaacaaataaaagacatctatccctattttctacacttccactttactaccatctttgaatcgtacaattttcttaactcttctcgtttacctcaattcattttcaagtggaatcaacttatcatctaacattttacgccatgctcgcttcatttcttgtgggtatttaaatggcttcgcttctggatggttggctttatatccttcgtaatccttactgttgataattgctttcatattaggaattggatcttcacctggcatatattgcagattagaagcatgtaattctttctcagaaacaaaccactcattggaaaaggtatgaatcaaatcatcacttgcttgtgtaaaatagcgacgtttaatgacaaagatatcttcattactatctaaagtccccacatcaaatgcatttaaaatttgtcgataaacttctttgactccttctgttttattcaatttagccaaagctttttcaatttcttctcgtgcatctgaactattcgcagcataagttcctagtaattgatcaatataagtagaatcaatatcatacaacttagtggtattttcactataaaattcgatcgttgaaaaatcttgtcctttattttctgattcttcctcgacttcaatcaaaaatcctttcactgtctggtacacaccaatttgttcttccaaaagttgaatttgattattcaaagttggggatttcaccatatcatcattataatcgtcataagtcactaacgattcatacgcacgattcaattcttggaatgctttgacatattcgatacgagtttcaagaggagtatgttcatcaatggattccatggatgaaacctcttttaacttacgatatgcttgcttgaatctttttttggattcttggtaacttggataaatcaaacccgattcttcttttgcttctgaatacagttttgtcgcatcctcgacattcttctccattgtcgctggcttacgaaacgttacaatcaatccttttgtcttttcaggatacgtacggttcgtacgtgaaaaagcttgaatcaatcctgcatactctagattacgatctacaaatagggtttgaatcgtaggtgcgtcaaaacctgtcaatagacgatccactacaatcactaaatcgatttgtttcccaaattgtttgaattccgctctttttcgtgccaaacgattattgatgtctccgttataacgctcaatgtctgctaatgaccaagaagtatcataatactgattatattcctcaataattttttgcatttcttcttgttggacacttgaatctcggctgttttcttctaaggaataggtaatagcgattcgtggaaaatcaggatcctccatcgttcttccttcacgaatgggctgattaggaaactcttttgttaaccagtcaggttctttcgtcatttctttgatcgctcgataatactttttggccatgtcaatggaactcgtggttaagattgcagatttcgttggcctgccatttcgaaaatcaaattttgtataggcattatctggacggaacattttatgaatgactttttggatatgttcatctgcttcaaaaacagctgggtccaaataactttcttttttgacaggctccatttgatcaatcatacgattgatctgttctgatgaatactctgcatatgtttctacttcttttaatttccgatagattttattctctagtgaagtcggctccacggtgttttcatgctctacttgaaatcctaagacagagccatcttctagcgcattcttaatggtataggtatgcaagacctctccatactgatcatgggttgtacgtgccaattgccctttggcttgtttccgattctcaggaaaaatcggtgtacctgtaaagccaaaccaagtggatttcggaaacatttttttgatttcttccatattttcagcacttaacgctcgatgacactcatctactacaaacacgatatgttggcccattaatttttggaagcgattggttccttttttctcttcttgtttctttgcatatttcaacgccgcatctagtttttgacgggttgtaatgattacaacatttgcattggcatctgccaacagggtttcacttaattctttggcacttcccgttccaacgatcaagctattcgctttggcgttcccggaagaaatcccagtattaaattccgaagcaaattttgtaaactctgtggtggtttgattatctaaatctttgcggtccactaacatgatcgttcgatcgatccccgattttcgtgctaaaagcttagtagatacaaaactagtcaacgtctttcctgaaccagtcgcatgccacacataccctgattgatgtttatttgcggcaataaacaaggcttgaatcgcatgtacttgataaggatgtaacaccatgagggttttattgtcttgatcttcactgacgattgtataatccgcaatcaaacgatgagcatccgggatatttaacacttgtttacaaaactcatataagttttctactttttcattgtctttcgttcgccaactaaataaaaacttagggtgcaagtctttcggtaaggcatttgcaaaataccgagtggtttgttcattggaaaccacaaacaactgtaaggtcgaaaagatattgttccgaaacataccttcttctgcatattttttgatttggttaaatgcctgataaacaccatcttttgcagttacttgtttcagctcgatttggacaatcggtaatccattgattaataaggtgacgtcaaaacgtcgatcccgtgcttctatgttacttccacgttttgcaatttgatggaccacttcataagtagagattcctccaccaatgtcttgattggaataaaggataagtgagacagaacccaattgcgaatcttcccgttcaatcgtgatccgagccatcccattttcaccttttaaccatttcgcagcatcaaatggggttttcgttcgcagcagtaattccgttttgatcgtttcaaattctttatcggtcaaaggaaaatcattcagttctgcttgattatttgagataattttttggcgtaaattgacccaaaggtcttcttctgattttagatccggacgatacgtccactgattatgcccttctccaagtacacgaatcaactgttcttcgacttctgcttcctcacggtgactaattttcattcttcttccctcctagacaaacatcttttgtaagaagctttttttcgtttcttttagtaaatctaacttacgttgatgaagagcgatcgtatcatctagctgtttgaagaaagtaccgattttttgttgttcatcctttacaggaaccttaacactgatattctcaatatcagaactgttataagaaggcaatgcccctacttgggagtatcttggcaaatttatagtttcaaacaatattttaccaaaatagatatcccaagtattattaaataaataagccatggtattgttatctattaagaaagggcttgtgaccaaacgttttctattaagcattattgctgcgccaactttagcaaatataatcgctggcacatcttttattggcttccattttttacgctcaatttgctcattagatacataatgatttgcatttctcatttcatactcattaccaatgttattcatgtcggaaactttaaaaaatggagtaccttcagaaccaccttgctcggcatcaggaaatccaattcccgattgagttttacctaattctcccaacttacgctcttcccaatcttccgtaaaaccaggaaaccggatttctggcacttttgctccgttttcagggaacattttttgtaagaatccttttttcgtttccttcagcaaatctaacttacgctgatgaagagcgatcgtgtcgtcaagttgtttgaagaaggtgccgattttttgttgttcttcctcactaggaaacattgctactatatttttaaacttttttagagacagaacatgttgacctgttccctctgcttgaatagataattgtcgttggattccattgttaatacgtcttaagaagaagtcggaatcagcagattttaaagtaaatacaggataaaaatagcttataatccctctatcaataatgtcattacggttaaacacaaacacatcattatcacttcgactacggaacgtgaaatatcctctaggtagtacaaagtaaccaatattattttctgtagttacttgccgatttgcaaaatagtcttcttgcaaaactatccctttttgttgagatgaagttagcataggaaattgattttgtacacttgtcttttcaacataatctacaacgaagtcccccaacttcctctgttcccaatcatctgtaaatcctgggaaacggatttctggttgtgtatcattgctcatgtttgaacacctccagcgcaccttgtaaccacgcttcattttcaggtgttgtttgcagggaagagatagcttctaaaagttttttttctagcacttgctgttcttgtcgtatcttcttgatgtcatttccgacatgaaccatatcaattggttcttcttcttcgaaagtatctacatagcgtgggatatttaagttatagtcattttctttgatttcatcaaaggttgccaaatgagcgtatttctcgacatcttttctttcagcgtaggtttcgaggattttttgaatgttttcttccgatagtttattttgatttttccctttaacaaattcacgactagcatcaatgaataatacatctcgagtttgacgattcttcttcaacacaatcaccgtcgttggaatcgatgtcccaaagaacaagttcgcaggcataccgatcacagcataaatactgccatcttctagtaatttttgacggatgaccccttctgcagcgccacggaataaaactccgtgtggtaagacgatggccatggtacctgtttccttcaaatgatagaacccatgaagaagaaacgcaaaatctgctttggattttggcgctaatttcccataacgattaaaccgagaatcatctaagaaagtcgtatctgctgaccaattagccgaataaggtgggttcattactactgcatcaaatgtgtaaggttcatctgttggccagtccttattcaacgtatccccattgcggagattcatttcttcggcgtcgacaccatgtaaaatcaagttcatttttgctagattgtatgtcgttgtatttagttcttgcccatgatatttaacgttatctgggtgtgttaagtagttacgtacgtttaacatcaatgaacctgaacccatcgttggatcaaaaacactaaagaatcgtcgttccttttgatcgagcgttacgatttgcgccatcatatcagaaaccatatgaggtgtgtaaaattctccggctttcttccctgcttctgaagcaaattgactgatcagaaactcatacgcatccccgatcacgtccccatcgtgttctaaaacatctacatcattcaatttcttgatgacttcggtaatcgtcacatttcgttgttgctcatctgttcctagtttttttgattggagatccacatcatcaaataacccattaaattgattgtaggtagatgccaattgcacaaaggctttgtttagatcgttcaattggaacgttgcttgttttgcttgatccgctaagacgttgaaaagatactctggtgcaattgcatatcccaaaatatcaacgattgtggcaatcagatcttcttttgattcttcatctgaaagtaattcacgatacaacattgtttgtttgcttactgtgtcatattcctctaaggattcatctgctaaaagaaccacttgttccaacaatcgatcggataaatatttatagaaaatcagtcccaataaataatttttatattctgacgcatccattttactacggagattatctgccgcactaaataatttttgatttaattctgcacccaaaaagatacactcctatctcttatttaaagttgctatataccctcttattttagcatacccccttttataaaaagcaaaaaaaaaaaagaaagaaacttattcttgctaataaactacgcgaaaggagtctaacgttgtttgatataacttagactgatcgttaacttattttttatatttctacatagttatctttagaaccatttcagatacatatgaaacaattacatatgattttttcataaaaaaacagtactgtctagtagtataaaatatacaaatttcttaaaaattttttcactaaaatcactacctgaaacagtctaaaacacttatatatcaacgtttaatgaaactatctccgtttcatttcagatacaaataaatatagtcgggctccaaatccgaaaaaaaatacccccagtagcttatcctaagctactggagatgtataagtacggtcatataacaacggggtagggtaaataaatgaaaaagatggaagaatcattattcaataacttttttaaatacttcgttgtaatcagttacctgtccgttcttaaataccacagaataatcttttttcccattttcaagtaaccgaagtggaatatctttaccaacttgctctgtcactgcattactgatacctgttagattagctaataaatctgataaagattgagcatctgtagaaatctctgtattagtatttatcgtgattcctttatcttcatttacaagtttccaagtaggtggtatagctgtgtatgtttccacaaatgaattaagtttttcattaagtgacttctcttttatatttccatctaaaaactctgtatatatggcttgagccatactaaaacaaagctgaccttgttccaataattttacatcgttagttagtaaagctgtgttcactttatctatcgcttcaagaagagtatctttggtgtccctaacagctttaggagtgccttctggaatttctctacttgatacctcgtccattttatcttccataaaacccttaaattcgtatctttctcccaaatccataaaattttttgataaagttttcatttctgagtctatttcttcaataatatttaacatgtctgatacatattgtttaggctgattcgtttttaatctatatgtggtagatatctcaatccctccaatcatcaataaaattgccaaacaaatccataataattttttctttttcatttttcctcctatctactgctgttataacagtgactaatgtaaagattttcccagtaatcattagactattatttacagggaatcaaaaaaactccttagtaagcttacacctttaggagttcctgtttggacggtatgcataatacatttaaatcaatttaacattaacacctcagtatatggtatctctacatatacacggtctttttttggatagtactcgacatttatattgatagcacttccattgtctaacgtagctttagcccggtacgtgttatcaccattatcatgagtgatcgtcacatcatcacatgtccgatttaagttatactgttcttgtaaaatctgagttaccaatggtacagatgacttctctagtccagatgaacccgtcattcttgaaaaaattatacctataatagccaatacgacgatacctataatgacaaacttcttgttcatatttactttattcaactttttatctcctatctccaaaataatttgcttttatccctcttatcagtacattgacatccctaaaagtacaccaaagatggctccagctacccctgctatcatcaaaatcgtacccatttgttcatctttatctcgatataagtagcccataataacagcaacagcaccaaatacaacaggaataaatgctaacgatactaccatagaaatccaaccaataatcaaatacagcttccctgtctcttgtccatgtacgatttgttccttcatttcattaattgtctgctcagtacttttctttactgcgtctgctccagttgtctcatctgtttcttgtagtgctccgcaaaactggcaatacttactttcatctgttatttctttgccacattttctacaatacatgtcttctcctcctaaaaacattcaattgtttattagttaactgtttactttattaaatacatcagaaaacagctcattcattggtacacttaatatctcagaaagcatcttcatttgatagggtttaggaatcgttctccctgtttgccacgaacttacacattgctgtgtaacattcattttttttgctaactccgtttgagaaagtcctttttcttttctgtatcggctgagattacttacttttttcatgattctcccctcctgttttattatatacaacaatatgatgtatttcaactcataaaatataaaaaacttcaaataccattacaaatacaacaacttgttgtactatactgagatgggggtgtattaatgaaacagaaacaatatgcaaaggtcattagagaaaagcgaaaagctctcgggtggacacaaaaagaattagctgaaaaaatcttctctacacaacaggcagtagcaagatgggaaaattctgtaacagagcctaacctcgatagcttaacagctctttctagagccctaggaacccctgtaagccattttctagacaatgttgtcgtagattatgaggaagagtttttggctctctatcgttctcttagcactgaagatgcagttcgaacaattgactatatgaagctattaaaaaggcaagaaaatgaacgcaatcagctattgaaagattgaaaaataaataacccaccgaactttaacggtgggtgtattgagatgaaataagattaagagctatggataacctgtctagtttaatacaattgggtcttttctcttccttactctccgtccatcatctcttgttacacttgtaaattgataaagaggaactaattcaactcctgataatatcaattcttttattacttcatctatccctgctccttttgctaggtagactaaaaaactactacttgctttcacattgtatagtctcttaatatccttagaagctcgttcaagagtgaatccttgtttaacaaagtagcctctgttttcttttaaagcattttccacgctgttattcccaacattacgtagacgttcacaaacagtgttagtaagttctttctctgtcattatatatgttccttgccacgataagccctgtaaaacttcatgtgcctcatctagaatcaattgtttttccttgctaagttctgatcgggaattttgcgggaatacttttttagcctcttcctcgctaaagcacatcttaacccaagcataagaaaaatgttgatatataaagtggtatttttccagtgagggcataatattttcagtcaattcttgaatcacagaagttgcattaaaggcatttagtcgatagacattgcttctcttataactaaagttcccacctttttcacgtaacgctttatctttcttttgcttattcagatactcgagcatatccatagggatatcatcgtcatctagtttttttatcaaacctataaaagtcataaatgataataacttattccatttacctactgaggaaacactctcttcaccatagtaaaaagacatttttttagctagttgttctcccgacataatacaagtcaagcttcctttactgtagtcaagaaactgaacatccaaaagcaaggtatcatagacacgtcgcatttcctctagataattctttattgtcctgaaaagcttgtcttccatagattcaagagtgtcaaaaagtacttttgattcctctttcaattttcgaaaatgtgtaggatacaggtctaggttctctaatagccaattaaaggcttctacccgactatctttctttagaattaacatcacaaccccaataaaatctacactgacaccacaattactagaatgacaatgaaaaatggaatgaccacttttcccggtaaaaatactagcagagggattatggtcgtcgtgaaacagacatcttaagtttttacttgacttaagtaatttgttcatatcaatggttaacaatctttcataaatctcattaaaagacatgtcggagggatcaaataagcaatctttaaaccactgttgcatttcttccctgtcttcattctttattaacttaacaaaatcggtttcattgactagttcatactctctctctgaatcactttgaccattttttgaacatgtcatagtgaagtcaatcggatgctcagtaatatctaacatgttgtcttcatcaattattatgactgcatctgacttatatcctccaaaaaacattctattcgaagcctttacattgtcatcacacccaggtatgttctttttcaagtattcgtaaacagaaaccattttactatgatcagtaatagcttcttttagaataaagataattttgaatttttctagatgttcagagtaccggatgcttttttgtatcgcaaacgcaaagttacgaactaaagagatagataaagccttttctatgcttaagtatctactatcatctttactcaaatctactacattattattctcatctttaacagtgttatcgacatccagaataattactctagtttctacaaagtcctcagctttgttacttttattctttgtcttgcttggaataaaagatagtgatgaatttagtatctctacaaattcatctcttgcaacttctctatagttatctaaacatctttctcttatatcagttttttctttttttgtaactggcttctctaatagcttttcttgatctacataaatattaatcactggtatttcctcctaataaaattttgataaagactaaaacatatagataataaaaacaaactctctattactatatgttttaatcttatttgtttactcaacctttataccgttccatgaaactatcaatatcagattttttgaatctaatgaccgtatcaatttttataacaggtaacccgtattgagaaacatattttctaatcgttcctactgatacacctagatattcactagcctgctggtagtccatatactctagtgtgactccagaaataatgtcttctagcataggctttagcactgtaattatctctttcacttgttgttcaacttgtatagagacaatgctatcaatgatttgcagggacatactttctccctcctttcgtgattgcttgaacaaatttcctaagaaaacaaataaataattatcttcgaattatttaatcaagataaaagtattttttcattattaaccgattaatcaaacaaaaaatgattaccggttcatcaaatgataaacatatgatacctcgataaaataggggtgtcaataattattaaaaattgttttacaacaccccttttttggtgtatactaattttaggaggtgtggtcaatatgataaagcgtccaccaataaattgtttagaacgaaaaaaaatactcggaacaaaaataaaagctataagaaagagtaagaaattaacacaaccagcattcggtattatgattaacaatggtcaattgattgacaaaaaaactgtctacgaatgggagaagggaacctatttaccaaaaccagagcgattatctcgaattgctgatttgggaaatatgagtatagaggagttagtttgtggcagtgtagaagaatatattttcggaattattctttatggagatagcattgtgttagatggtataacatttccgaataaaaatctgtcacagcatctttatcaacagtttccaccagtacaccccgatttagataaatggctgaatagatattccaaattagaaccagagacgcaagaatttattgctaacaaaacttgtaataaagttaaaaatgaaaaaattagtcttttcaatatcttaaaaatagaaaaattattcatcaatgctattgtagaagaatttgacaataacattcttttcctcactagcagtatagaagaacagctaaaaataatggtagatgaatggctacctagtcaattggaagacatgacttatcccaaagaagctgtgagagaaatttttgataatataaacaagctagaacaaacgatttcatcaattggaaaaaaatacactaagaaaaaaatgaagggaggtgataccatctagtggtaagtactccttgtaaactaagaggagatgatataatggcaaaaatatcaaagtacaaaaagaaaaacggtcaagtggcgtggatgtataaaggacacattgccaccgatccacgaactggtgaaaaaataaatactactagaaggggttttagtagcaaacaagaagctcaaaaagattatgacgaatacagacatcaaatattatatggtgctaaaaagaaagaacctgatatgacatttgaagacctgtataatgaatggatcactcatcagcgtatcagtgttaaagcttcaacaatcgcaatctcagtaagatacgcaaataatcaaatacttccagcatttggtaagcttaaattatcgaatatctctgtcccatattgtcaaaaagtggtagataaatggcacagtgaatatgaaagttacgactacatgagaaagcagactgcacaaattttacgctacggggttgcaatgcaatatattgacaataatcctatggaaaaaacacttcttccacgaaaaaaagagtatgagaaaaatcgtaaattttactcaaaagaggagcttaataatttactggatgcttttaaagattttggtaacatgaaacaatacgccttcttcagattattggcatacacaggtatgagaaagagtgaagtactcgctctacagtggaaagacatagacacgtttaataaagaactacatgtcaataaaactcttgctgtggatgaatttggtaaagttataattcaatctccgaaaacaagagcttctagaagggttatctctttagatactgagactctttctatcctcaacaactggaaattacaacaaaaagaagagtgctttaaacttggctacaatactagctctaaagagcaacatgtttttacaacacttaaaaacactctgtacattccaaacactgttaatgattggctaagatatattttgaaaaaatataacttgcctcgtattacacctcatgggtttagacatacacatgctagtttattattagaagcaggtgaatctgtcaaggtagttcaacaacgattagggcatgaaaatagtaaagtgacattagacatctatgcacatattacgaataatgcacctaagaaaacaggtcaagactttgctgatatgatggctcatcagtaaaagagctggtcaaaagctggtcatttctagtatacaggtaaaataaaaaagctagaacccttatataccaaggattctagctcctataacaagtttatcctacactgccttccatctcataacttatcaatcggtttagctcgacggcgtattccattggtagttctttggtgaatggttcgacgaagcccatgacgatcatttcggtggcttcgctttcggataggccgcggctcatgaggtagtagagttgttcttctgagatttttgagacttttgcttcgtgttctaatgatacttggctgttgtggatttcattgaatggaatggtatcggatttcgatagatcatccatgatgatagtgtcacattcgatgtgagagatagagcctgcgctcttcttgccgaaggtgacttgtccacgatagtttacggcgccgccgtcttttgaaatagatttcgagacgatggagctggaagtgtttggtgcgttgtggatcattttagcacctgtatcttggatttggttcgcaccggcaaatgcaatggagagcatcgtaccgcgggcgcctttgccatcgagatagacacttggatatttcatggttgttttggcacctaagttgccgtcgatccattcgactgtggcaccttccaatgcttttgctcgtttggttacgaggttatagacattgtcggaccagttttggatggttgtataacggcagtaggcatctttcaaggtgaaaatttcgacgatagctgcatgcaaactattactggaataggttggtgcggtacagccttccacatagtggacgctggcaccttcatcaacgataatcaatgttcgttcgaactgaccggtgttttcggcattgatccggaaataggtttgcagcggtacgtcaacgcggacgccttttggtacatagataaaggttccaccggaccaaacagctgagttcagtgcagccaatttgttatcggttggcggtactaattttgaaaagtattgcttgaagatctctgggtattctttcaaggctgaatcggtatcggtaaagatgatgcctaacttttcaaactcttctttcatgttatggtaaacgacttctgattcatactgtgccgaagccccggctaaataggcacgttctgcttcgggaattccgattcgttcaaaggtttctttgattttttctggtacatcatcccagtctcgagctgggctgtcgctaggtttttgataatatttgatggcatcgaaatcgatgtcggacagatccggtccccagttttgcatgggcattttgttgaaggcttctaatgacttcaatcggaattccaacatccattctggttcttgtttgacccgtgagatttcacgaacgatgtcttcggtcaagccttcaccggtactaaatacgggctgcacgtcatcgtggaagccaaatttatattcttctaattcgggtacacccatggttctcactcctttgttttgctgcaatctactctacttgatgctcatcggtttccgagtgtctgtgttccacatctgattgttgggtatcgtcggcgatcgctttttccaatgctttccatgcaagggtggcacatttgatccgcgcgggaaacttagccactcctcctagcattgaagcatcacctagacggtcactgtcagaaacagtatgaccttggaccaattcagaaaataaacctgacaattctccagcttcggtcaatgttttgccgatcactgcatctcccatcattgaagcactggcagtgctgatagaacagccttcaccggtaaatgccacgtctttgatggtcttcccttcaacggcgagttctaaatgaatcacatcgccacaagtgggattattcaattcaactttataggtagaatctcctagtgttccgcgatgatgggggtgactggaatgatctaatatgacttgtcggtataaattatctaatttcgttaatgccatgttggaaaaactcctttgttaacttgatggcgtcaaccaatcgatcggcgtcctctcttgtattatacaggtaaaagctggcacgtgcagttgccggtacgtgcaaatagtttaagaggggttgtgcacaatgatgaccggcacggacagcgacaccttccatgtctaatgcagtcgctacatcatggggatgaatcccgtcgatgttaaaagcgatgacacctgttcgtttggctgcttcttgtggaccataaatcgtcagtccatcaatggcttgcaattttggcaaaacataagcgaccagttcagcctcgtgttgatggatggccgctaacccaagttcactcaagtaatctaccgctgcccctagcccgatggcgccagctatgtttggagtacctgcttcaaacttccatggcaattctttccacgtgctttcttgaagatgaacgaaatcaatcatttcgccgccaaattccactggctccatctgatctaaccaataacgtttgccatataagacaccaatgccggtcgggccgcacattttatgaccagaaaaagcatagaagtcacaatctaatgattggacatcaactgacatatggggaactgcttgggcgccatctactactatcacggcttggtgttgatgggctagttgcgttaactcagcaattggattgatcacaccaagaacatttgagacatgagcaatggcaaccaccgctgttttatccgtgatctgttgacgtgcatcatccatgtcaaggataccttctggcgtcaattggatatatttcagaatcgctttcttgcgttttgccagttgttgccatgggatgatattggaatggtgctccatgtaagagatcacgatctcatcaccttcattgacaaattgatccccaaaactgcgggctacccaattcaggcttgtcgtcgtaccacgagtgaacaacacttcgtcggtttctttggcctgaataaaatggcgaactttttcccgcgcggcttcataagaatgggtcgcccgttccgccaatgtatgaacgccacggtgaacgttggcattgtcttgatgataataggcagcgatcgtcttcaaaacggcttccggcttttgggtggtggcagcattatcaagatagactaatggctcatcattgacgacttgatccaagataggaaacgcttgtttcactttttgggcatcgatcatgcaagtaacttcccttcaataacagccaccagttcttgttgcacttctttcacaggaatggctgttaagacagatcccagaaatccgcgaatcactaagcgttctgcttcttccttgcgcaagccgcgactcatcaagtagtacatttcttctggatcgacacgacccacactggcagcatgtcctgccgtaacttcatgttcgtcaatcaatagaatcggattggcatcgccacgagcttggtcagacaacattaagacccgactttcttgttgggcatcggcacctttggctccttttaaaatatgtccgataccgttgaaggtcaagacgccgcgttctctaatgacaccatgttgcaaaatgtggccgatcgaatgtggtgctttatttgtcactcgcgtatcgatcccttgtgtttgccgaccggcactgatagcaacagcttttacttcagaatgggcgccttcgccaacgaggtctgaatcaaagtcagcaatcacatcgccgtcattcatgacaccaatcgcccaatcaaccatagcgtctcgtaagacatagcctcgtcgattcatataggtagtgatattgacccccaattgatcaatagctgagaatttgactttagcccctgctttggcgatcacttctacaacgatatttccagataactttttggcttgatcccctttggtttggaaacgttccaagtagctgaattcactgtgctcatctgctacgatcaagacatgcttgaagaaatgcgcttggctattgccattatgatagaagattgcttctagtggttcttcaatgatgacattcttgggtacatataaaaataaaccactattcataaatgccgcatgggccgcagtcattttgtcttcatccattgggactgctttagtcatatagtattgattgacgagttctggtacttctctcattgcggtaaacaagtccgtaaaaatgacaccttgatccactagatgttgcggtaattgttcaaagaccgttgtttcatcaaactgaacaaccgttggatggctatccattgcatcaaaggatggaactgcccccaatcctgctgccgctggatcaatcacgccagagaattcttgttcaccgacaagtgctgcttcattgatattaaacaaaggccagcgttcataacgaacccgttcaatttttggaaacgggagttcatccacttttgcaagggctgcttggcggagttccaacatccattcaggttcttctttcaacgctgaaaacacgttgacttggtcaagataatcctgtaattttgccatttgccttgcctccttatgcttcttcttctttgtagtcgatccctaattctttactgattacagcatatccttcagcttccaggcgtttcgctaaatcagcagatcccgtcattaccacgcgaccttccatcatgatatgtaccacgtcaggagtgatataattcaacaaccgttgatagtgtgtaatgatgagcgcgccaaagccttccccgcgcatttcattgacccctttagcgacgactttcaaggcatcaatgtctaatccagagtcgatttcatctaaaatcgcaaatgttggttctagcatcaataattgcaagatttcgttccgtttcttttccccgccagagaaaccttcattcaaatagcgttctgccatttcttctggcatgttcaatagatccattttttgatctaatttctttagaaaatccatgacagagattttgtcctcttcatcccgtttagcgttgatagcagctcgcatgaattcagcatttgtgattcctggaatttcactagggtattgcatcgccaagaacaaacctaaacgtgctcgctcatccacttccatttccagcacattttccccatcgaacaagatttctccttcagtgacttcataattcgggtttcccataattgctgcagataaggtagattttcctgtcccattaggtcccatgatggcatggatctcaccggtttttaaaacaagatcaacaccttttaagatctttttatcttcaatttggacatgcaggtttttgatttctaaaactgacattctgttccctccagtatcttttctttctcactattttagactaattgagaatgaagttcaaacgcaattgcctacttttttaaaattcttctaatctagcccctagagatacattggaatcattacaaactgctgtgaggatcccctttgaaagaaactaaaaaaagacaccctcagccccgacgaaagcatgtgcttttgtctttaggaacagagggtgtcctacttgaaaactctaagcttgcacgagcaaaatgatgcaatcaaaaagaagcatcaacatttgcaagcggatgatagagttgattcattaattctgtgtcgcttttacgtccacgattggatagtaggatcacgctggttttgttgtctttagaaaacaacccaaacgattcgaatcctcctttaccaccatgagcccgaaaataagtccctttgtcataaaaacctgcggcataggacccgccagcggctggttgccacatttgcttcagtgaagctttatccagcagtttcccattcaataataaatcataatagcgatacaagtcgccaactgacatatagagatttccagttcctacctcagctgccaagttggctgaggaaatattgttagggttcccgtaaggatctgcttcgccatccgttttgtaattgaccgtaggatgatcctgctgtaaaaaggctttatacaagaaagattgtttcaacccattcttattgataaaaaaatccgttaacaacgcatcataactttttcctgatacttttgtcaaaatacctgccagtaaattgtagttgatgggactatatttgaatgttccttgggttccggataagacagcatgggtggcatcccagtcgaggatctgttgcacgtcttccagcccttgcggattttctgaaagtttgagtccggaagccatctgcagcatttgctgaatcgtaatcttggcagcgcctggaatatacggataaaagcgcgctaatgtatccgtcaaggatagtttcccttccttaattgcccgcatgatcaagaccgccgtcaatcctttttgcatcgagccaatattgaataatgttgccggggtgtttttgacatcagctgctttgtcagcatatccgtaccctttgtgcagcaggactttcccgttttttacaaccaatgcacttccaataaaaccactggaaagaattttctgatcgtagctggctccttcggctgtgacgacttcttggtcactaatgagattgtcatagttccccgcatccaacaagtcctgtttcttgtttgcgggttgctcctttttggaggaggagctgctggcagtactggaatgtgcgacttgctcactgtaatgatcagaagcagccgttggttccgttggcaaaaacaagtagtagatgccaatgagaccacaaatgattaccaggatatcgatcccaagcaatagtttttgaacgtttctttttgagcgtctttttgagcgtctttttgcatgtcttttcgtatgtctactcattgaatgaagcctccagcatccctattctccaacagtcctcctttttcatttcccctgaatatcttttggtgcctcttgctgccaatttttggagagaaaataatggttgatttcatacaacggtttttctttgaccttggaatccaagaatggctgaatgtattcatctgctgccaaccagccacgccagcctaagtgaatcgtatcttccatgaaatagggttgattgcccttcgttgataaatcagcgatattcatgaagccctggcttcttaactggtagcggatctttttgtcaaaaccggacaacacctcttgcggcaagccggtataatccatccacttctgattgatgggcggaatcacaaataagacatccacattgttgcgagcaaattctgtcagtactagttgaaagtcgctatattctggtccaaaacgataatcccatttcttttgagagcctttcattttatctatgcggctttgcagattatgttggtaaaaagaattcttgatccctaaagaattattagtcgtttctgcttttccttcattatcggctacttgttctatttgagcgagattataggtagaaggtaatttctttgcagcagcagtgattttgtcagtcaagttgtgccccaacccaagaccactaaaaagctcatcttcccgtttcaaaatagatcgttgcagatcaatctgttttttctgccaatcagtcggtatcttaccggatttcacttcattcaagacttgttccgtcaagctattttctttcactttcgaatagtctaagagacgttcggcatagtattgatcggtgtcagagactttctttaacgaagagagccaatcgtacacatgctgttcggaataatgatggttgaaatagtctcctttcaaccctttaggaacgaaccattgaggggaaacgatgaagactgcttttttccctgctaattctttcgccattgattgaatgatggcgtactgggtcagcgactgggtgccaggtgcaccaatcaaaaatggcgtataagaacgttgatatttctgcgacaatacggaaggatgggtggcactcacacggtttaattcggatgagccaaaaaatgggacatattttcctgttgctattgcctcatttttgatacgatccccgcgaaacaccacatcattcattgccgtcgccgcttgagcgatgactttcggatcgtagctattgatcttccaagggccaaggaagagtaccccgacaagaatccccacacaaagaagcggtccaaaagccgtgagtagtcgttttttcatcatcggctttgcagcgtgtcgactttctcaatgatttttgctggtgtattccactctgcccggtcaaattccgatacgggaaattcaattcctaactgcccttctagttcaaccagcaattgaacagatcctaatgaatctaataatccttcaccaaaaagatcgattgtttcgttttcttttacttcatcacttcctgtaactgattctaaaatgtctaatactgcttctttggttgtcatattcttttctccttttatttaacgaataatttgtccaagattcctgagaaaatcagaaaactaaagcaaactgcttggaaggtcaatacagtggacaccgctttggttaggttgttcgatggcagatttccttgttttttcttccaacggatccacgcatcatttccgcaaatcaatgtcgcatgatataccccgtataaaatgtaataccaggtaagtccatgccaaatgcccattaacaaaaagagggcaaaatagccgacattggatgcgacgatacggcttttgaaaactttcttcttgatcagtgtgaacattaaacgcatgtacacatagtctcggaaccaaaaagacagactcatgtgccaacgattccagaattctttgatattaggcgccagaaaaggtttattgaagttagctggtgtatcataacccatgaagttgctgacaccaatcgcaaacaaactatagccagcaaaatcaaagaacagatacatactataaacatacatataactcagcattccccaagagaacaagccattttgcagggcttctttggttacgatcggcagtaatacttgaccgagataataaccaagaatgaacttatacaggagccctagcatgattttggcgactcctttgtttaaataatcgagatacacttcttttgtcggcggattcagcagatccttctcaaagcggcgatatcgatcgatcggacccgaagaaatcgttggaaagtatagtagaaactggatataacgccaaggatggtattctttgatcagtccatcccgtatctccataatcatttgcactgatttaaaggtcagataagagatacccaagaaataaatcaatgaggcatgtccaacaaagaaaggggtgactttgctcaatgccaatggtaaaatcgctgctaccactgcaccataaaagacgcctgaagtatttgctcgttggcgatgctgataatagccatagacgagtaatgtctgatacacgacgtatccgatcagcgctagcccctgttgccaatattcaccaccaaaacttacgtacaataccactagtgtgagtaacgtttgataccattgccaacgcttttgtttgaacagcagcacaagcatcatcggaagcaatcctaccattagccaaatgaaataggtgggatttgcataaggaatcatatgctgcaggttcatgaaggattcacctcatttgtcagccatttgcggtcgattttgccatttgccgtatgaggcaactgctcaacatagataaatcgctgcggaatcatatactccatcactgtttcactcagtgaagatttgatggcttttgtcagttggaactctttctcgaatgggtgcgtttcgggaacgacataagcaatcagctgttccactttcttttcttgatatttagggactacgacggcttgtttgacccacgaactattgcttaaatgatggtcgatctcttctaattccattcgatacccatggaacttcacttgaaaatcaagacgcccttcataatgcaacaaaccatcttccgtcattctgccactatcgccggttcgatacgctggttgcccttcatggacaaaaaatgcctcttttgttttctcgggattgttcagatacccttttgacacgctaggaccactaatgatgatctcacctacttgccctttaggaactagttgatcttcttccataaagaaaaccgtcgaatcttctttcacatacccaattggcactcgatcatattgctccagtaattcttcagtgatttgcactccggatacggcaacagtcgcttcagtaggtccataggtattgtagatttttgcatttggaaaacgttccagcagtgcgtgagcggttttttttggtagttcttccccacagaataagaaacgttccaactgaggaacgtgcatcccgtcaaaggtctcttccatcaaacatagtttcataaatgaaggtgtcgagatccaaacattgatagccaattgcggcaaggttccaaacaatgttttgaagtcattaatgaccgccttttttaaaggcaccaaacagccgccagaagtcaatgctggatataaccccatgacagagagatcaaaggaatacggtgcctgtgccaaataatgcatcccttcgcgtaaagaaaaatccttcaatgtccattgcacgaaactcaataaatttccatgactaatctgaactcctttagggatgccggtcgttcctgatgtgaagatgatgtagtaaatatcatccttccctagtacttttgtagtgcctaaattgcgcccactttgatagatttcttccaattgatttatttctagcattggaatcattgtttccggaccttgccagtcagctacgctaatgatcaaatctggcgtaaccacagagaggatcaattcaatacgctcttttggcgtggtactttcaatcggaatatatgcccgacctgttttggaagctgccaaaaaggctgttagcatgtcaaattctaactcgccataaaccacgatcggtccgcgagtttccagagtttcctcgagataggcagctaattggtcggatcgagctgctaattgtccataagtatatgttaggtcatcttctcggtaggcaatcctctctggatccttttgtgcccattcttcaatggcttgcacaatatttaccacgttcatgaacattcctcctaaaattcattatagataaaggtgccaccttgcacgtttttataatgataaagataaatcagcatcaaaatgatacagaaataaaaaagggttttgcctgcaaagaagagtgcttgacgcacatgttcatttttgattcgttgtttcaccaaatccctccttttcttgctatattgattctagaatgaaggagtaaataattgaccttgaaatgttaaacaatttataaactggcgataaactttttatttcatttattagttttttttaatctgcttacatttttgtaatacaaaatggctttcacgaacaaaattgtcatctcttcataaaaaaagcaagaatctctttaaacagcacctatgctgaaaaaagattcttgctgctatattttttggcagcaactaaccactttgctgcaatgttacgccttaaagcgataccctgctccccagacggtttgaatatattgtggattggtgggatcttcctcgactttttctcttaaacgattgatatggacggcgacggttcggatgttgcctagtgcttccatcccccagattttttcatagagttgttctttgctgaagacgatctctggattttccatcaaaaagagcaataactcatactctcgatgtttgcagtcaacttcgattccatccacgtaaacccgatgcgtttgtgaattgattcggataccgcctaattcgatttcactagatacagtttctgtctgttgtccgcgcttgacccgattgtattgtgcaatgttcgctttgacccgagcgacaagttcggttggcgaaaaaggtttcgaaatataatcatccgcacctatacctaaacctcgcagcttttctaattcttctgacttggccgtgaccataatgattggaatatcgactttatcgcgaatgtttcgacaaatctcatgtccatccattcctggcagcatcacatccaataggatcaattggtatttctccgtcaatgcttcatgatagcccacacaaccgtcgttaacgatatggacttcatacccttccatttctaaaaaatctttttcgatcattgaaatatcttcatcgtcttcaataattaatactcgtacactcaacttcgatcacttcctttttgatttaactgggagggtgataacgatcgctaatccccctgctggatggttgtacgcttgaatcgttccattgaatccttcaatgattttcttcgaaatcgctaagcctaagccattgcctttgctcgggttggttcttgagcggtcatcgcgatagaaaagttcaaacaagtcttccaaattctcttccgaaacaccgctgccgttatcaatgatcgacaagataaactgttcctcaactacttcataagagacgaccacttgtttatcgttgcgatccacatacttgcgggcattttcaaatagatttgttaagactgtacgaaactgaactggatccacttctagcgaaacgttttgatccgtcggttccaatagaatcgtcaatccattcaattcgtattcctgctggataaagccgatgtattcatcgatcagttttttactagtagttgtcactagattgaaaggaaattcaccggtatccaacttagaaaacaagaaaagctgtgcaatcacttggtccaaatcatcgatcttcttttttacaatcgtaaaatatttggtccgcatggcaggtgtattagcgatccccttctctaatccttcgacataggctttgatcgaagtcagtggggttcgcagatcatgggaaatacccgcgatcaattctcgacgattggtttccagtttgttttgattatccatcatttctttcagctgacgtgccataccgttgaagtcttttgagaccggtaaaaattcatcttgcttcgtatactggatctgatattgcagatctccttctctgattttatagaaacctacagtcaataattccaaaggatcggtaatacttcttgtgagatatcgcgtcagaacacggctagtaataaaaataatcgacaaaatcaaaatcacgactaacacgatgatccgagacaacatcgctttgtaatcgcgatcccataatggatcttgataatacaaatcattgtaataatttgaattgatcaagataatcttgtagttgctggtatcaaatgtcgtaagaaaggtttgatcttttaagtaactatgttctccctcttctttaagagcagtttctttcattttttgatctgttacttcccctacagacgaaattagcttgtcgccgcgataaaccagcaatgcaatatttttgctatgattggtctttttgaaatgttgcatgtcggcgactacttctgcatctgtcgtcttctccgtatcccatttgatcaccagactttcaaccgtcgcatactgggcacgaaattcggtattcttgatcatggctccttcatctagcccccagaaataacgccagaccattaaaaaagcaatcactgaagctaataagctcaataaaactgggacaataatcatcaatatatgcgatataaataaacgctgcttgatagtcattcttttcctcttctctttgatagcgatgattcaacatagttatgcagccatcatttaaagtgttctctttgaaaaaattgggatcgcctgttttcacgacgtgatccgcctcttattgaaaggaggtgctgtctatttttttcgattttagcccatacttataggtacttcaaccgatgccttcagtcagttgtgaaagagtgaattctttcttccttgcacacgcaatgatccgatttcttacctttttaaataaagaaaataaaatttgattatcagaataataaaaactgagccaatactatagtaacaggaaatagtaaacaaaaagtaaactattgctaaaaagtaaattaaatacgaaaagtacagcccggcttctccccctaacgcaagactagctgctaattgcggcaactgtatttgttctttgagacagctttcgttatactaaaaaaaaatggaagaaaggacatacactatgacagtcagaattgaagaagtgtcccagtctacttggcgtacaattgctgccttaaaagtatcagaatcccaacatacttttattgaagacaacaccacctccttgctggaagctgcatatgatacttctttgcattgggtcccgcttgctttgtacaaagaagaaaccattgtcggctttgcaatggtcggtgcctataacgaacaagaacaaagtatttggttggatcgcttgatgatcgatcagcattggcaaaaattaggcttaggcaagaaatttatgccgttgctcctagactatcttttctgccattggacagtggaaaaaatctatttaagtgcccacaaagagaacaaaacgatcttttcgttttataccgcttttggctttaggcatacccaccacatagatccagaaaatggtgaactgattatggtatacaagaaaacgactgcgacagaacctttctaaaggttcttcgcagtctttttgcttgtttcaatgaaaatgcgatagtcgggtttcacctgacacttggactaatttgaatctgtctctattctattcgatcagtcactaaaggaatatcgattctattacttttgatttcgtcagggatcctatctgaatcattgcaatttagttaaggagttaagcgatcgtctatccttttttcaattgctgcaaaagctggatgattccacagcagcaaaaatggtttcaaagaattgatagcaaattttagcgggttcggatttatcttgcttttcaaatctaaaaataagaaatggtacccattagtcgcagctcctaatcttcttatctctaaataaagatattccaagtctgctcttcttatgtgaaatagttcctgttcctgctttttcataaacaaacaatggttttcccccaacttgattatgtcaatcgtatcttctccaatgatacatttgcaattaggcgttccagctgaacatttgacaaacccttgaggatattccttggcgtcaatttcaatcagtgctgctacccgctttccatcgagtaacattttttggatgtcatttgaaaatgtactataaaaccatgattgattactcgtttgcttgtccatttacccagctcctccctggcatacttgttcaaaaacgtttgtctataaaaggcgccattctatcattaagagtagtctactattaagaatagtctacttcttacttctcaaacatacaataacattttttattttgaatatatttttttagcttacttattttgagcaatgggcttcgcccaaagtttcttgcaccatcactcgtcttattctcacaaattccacatcatggattcttctcaaactcctattcaatgaatatacaaaagaagcacagaagtaactttctgtgcttcttttggcttgttttgattcctcactttgcacgttctttcgtgacgtttgattcgtcaatcatcagcttttactgactggaatccatagctcgcttttgcagtcgggtttagacaaatcgggactttcatgccacaaaagttcgggtcctccagttaattgataatcagacattgccagccattcgctgtaaatacgcgcccaagtttcttgaactgcttctggaaatggtcctactactgtaaagactgcccaatcagattcttccacttgtaacacatcataaggttctgatgctttttgggtagttgctacaccgacatactgatcaagcgctgttccttccacttctcgttcgacaaaatttgccgacacactgataattcctcgcggctggatatttgccagatttttgagttccataatgcgctctggcgtcagcttttcatacagtgatgtcatttgcggattctctccctgatactgcagcgtgatcctttttttgaaaccgacgatttgaaaaggttcattgtgcacgatccgatagtccattttgttacctcctttgattgtcagctggaaagtcattggtggaaatgcttttagaataacatccagctgttttgcttgtgagggagaaatgccatgcatcccacgaaaggctttgctaaaagcatccgacgaatcatagccaagtaacgttgcagtgtcgattactttcgctccttgtttcaacaagtctcctgccaaaaccaatttcctgcatcgcaaatattcgcttaaagacatacccgccaaataggaaaatacccgccgaaaatgatattccgaacaaccagctaatttagccatgtgtgtaaaatcaatttcttctaacaagttttcttctagataggccattgcctgattcatattctctaaaggattcattcgtcttctctcccatctcctacacaataacaaagttcaaagaacgtcacccggtattatcgttgcatgttttatcggttttagtcaaaagtattttttgatgccccaagtatagcatagaacaagaaattcctttaaatgcatgaacgttctctatgttttaaaaagtgtatttgtaaatagatctatttttttgagctgtcgatgtactgattcctaaagactaccgcacacaaaaataccaaaacaagaagataggctccttgttttggtatttagtcgtttactcatcgatcgttcttaatgaacaatccttgtctccacttaagaatcgacatctcgtaatcaaaaagaactgctaccttttattttcgtctttttattaaatagaatccaataaagctgactaatccaattcctataaggtttaaataactttttgatacgtcattggtttgtggtaattttgcttttgattctgaatctttttgataatttgtattttctttcttagatgttgatgtcttgtttttttgctctgaagtggatgtttttgctggagaagcatcttttgtatatacatatgtgatggtttgcggctctttccctagctttccgatccgattttctggtaattggctctcatctagatgataaccattgatcgacaactgatattctttcgtagtagcatcatagtgatcaccgatatttccttgaatggttttcgctgcatgaatttctttgccgtctttgtcaacatagacaactgtcacagctgccgctctttctgaatctttgcctttatccgaattcttcgtatacacatatgtcacggtttgcgcttgatcactcattactccagtgccattctttggcaactgtttcgtgtctaatgtataaccattgatcgttagtttgtatccatccgtcgtagtcatctccaacatttcctgaaatgacttgtggtgcgtggatctcatttccatctgtgtccacatatttcaccgtcacatctgcggcttttacagggtctttcgcgtacacataggtcactgtttgtgcttgatcactcattaccccaataccattatttggcaactgtttcgtgtctaatgtataaccattgatcgttagtttgtatacatccgtcgtagcgtcgtagtcatctccaacatttcctgtaatgacttgtggtgcgtggatctcatttccatctgtgtccacatattctactgtgacatctgcggctgcttcttgatgattgatcgcaaattgatgcaaataggtacctgaagaaatcgcgtagaagctaaacccatctggttgtgcatatgtcccggctggattattcagacgtgaattgtatttcatcgtatgaataccttcaaattcttctggggttatatcagacacagtgacgtcttgatctgtaatagatagctgagaagaaggaagttgaaccccgtttaagtcaaaatacgtttggctttgactattggatgttgaaaaaggtggaacatagccatcaaaatttgttagtcgattgggcatgatcgaaaacgggacaaaaaatgactgcgttgcagcatcataattcagctccttagcagatatcgtagtcactccatcacttcttcctgtattctgcccataagccgccagattttctaagacaggaaaattgttgataacggtgaaatcgctgaccgcacaaaattgaatccgtaattcctttaaattcggcaatgtagccaatggcgcaatcgtagtaatattcatattcgactcaaaagtaagtgattctaaattcttcatttcaagtatcttcggatagacagcatctgtgacattagcagaagaaaggttcaatcgagtaaaattgtccccaaaatcaggaacattgtcatctgtaacattcgctcccattaaataagcatagactaaactatctatcttagttaataccgaaaaatcagaaatctgattggttccattcatgtaaaaggaagacaggcttgtggcatactccaaaccggacaaatcagcaagagctgaatcagtcgaataaatatagattgtctgcattttactgattttttctttagtgatttctgatacttcgattcctaatgccttcgccactattgactgtaatgtaggatctggtaaccaactagaaacatcctcagtattggcttgattatcaggcaacgaatttgcgaactgttgagcatttgatggcaacaaacttctagctgatttttcctttgatttggcagaacttgtatctggaatcgatgattcttctgtacctactgttgatgctgttgatgttgttgatgcttcactctcagaacttgattcctttgaatcagaagtaacactttcagaggtagaagattcagtaacagtctcaactgaatcgttgctagtttcttgggtggtgtcagactgtacagagtcgtttccctccgctgctagtactgtcactacgggggtagccagtggtgaatttaataagacaaataaagatacatagctaaatatttttcgtttatttttgatctccttttttgctaatcattaccttttctttttttaaccatattctcattttaataataataatcctaaaatggaaaatagtaaagttataacttaactagtgaaatatagcacgaacgttacgcacttttcacaccccaatcacgccatttcatttgctaaaaattaataactactgtatctgtagaccaaagtatttctaggaataatggtagcaaaaaaaatagctgtacctgctttgactttgcttcaaacaaaaatcagtgtatctacgcttactctcccatgactttcaaaaaaggattgcatctaaaattgtaaattgatcagctgaaataaagctgcttcttagcttcctcgtctttcgatattgtggagcaagacaatcaataacagttggcgacaaaaaaagaccagcaaggaatatccccagctggatccacaaatagatattttttacgttttagcagttagatctgttatcgatgccaacagacggaacaaaaaatcccgtttattggtacagtgcagtttttttcttacctgcccattctttggttccattcttctcgcagcacaccgtattttactgagtcataatagtggccttcccaataacgaactctacggatttgtgcttctttcgtcatgcccagtttttccccaaccttcatcatccggtgattgcctgaccaagtcgtatatccgatccgttggatgagtggttcttgttcaaataagaatgtgatccacaaacgcatcgcatgactaccgaccccatgattccatatagtggcatcatagattgctacaccaaattcaagccattgatgcagattgccatcttcccaatatgcagtggcgattcctacaagccttccttgataataaatagccttccgtaatggattatttaaacaatttttgccaaatccatttttgaattcttcccaggttaggatagggtcctgaaaataaggtccatcccactttttccactctaagtcagctttaggaccataactgatcgaccaaagagcagaaaggttttcttcggtgattgatttcaattgtatatgatttttcatctttctccttttcaaacatcaaactgctgaaaaataaaactgaagctacttgtttttaccaaacaaacgttgaaaaaagccatttttttcggacgctgtttctttgactaccactgtaccatcggtgtccttccactttctctgaaacgtaagattatcttgtaaaagtaatccatttaactcgaggataccttttaacccagcaatcgttcggcgcaactcaccgtcttgttgaccatagaaatccttcttcccagcatcttcaagttcttctagttgccggattaactctcgaagtgtttgagcctgatctcccagaatagccgacatctcttccacttgacgttcttctatcgttggtgccgtttcgtaaatagtcactaaagataaactatcgacataatcctttaagtcaaaaagaaacgtttggcttgcttcatcttcaaccattgatgttttcattaaatagttttgtaacgcttccatttgtttttgctgaacgagtaaatctaacactaaggcctctgtgtccatcggtaccacctcctactctattgttgcgtttttcttttgcttcgtcaagaaaagcttcgagaataatgttgaaaaacagacgggctgaatagtaattgttttctctactgtatattacatatcacataccacttcttttatagtcaaatttactagtttctgcaccaccctacagttaactcaattcattgtatctctcaactacaaaaaatatcccctcggcagctaagataccgaggggattggtgcattcattgcttagccgttataagcatccacaatgatttgtttcaattcagaaatcaatggttctttagggttcgcagttgtacattggtcttcgtaagccaattcagccatacgatctacagttgcatccaatacttcttgagtcacgccttgtgctttcaagttcatatcgataccaacggatttacctaattcgtaaaccgcagttgctaatgcttcaactagttccgcagttgtttctcctttaagacctaagaatttcgcaatgtctgcgtaatctgtgtcagcacggaagaaatcatatttagggaacatcgcatgtttttgaggatctttggcattgtaacggataatatgcggtaaaagaatcgcattggtacgtccgtgaggaataccatattctcccccaattttgtgagcaactgagtgacaaatacctaggaatgcattggcgaaggccatacctgccattgttgatgcgttatgcattttttcgcgagattccatatccggtgttttcactgatttttctaagtagtcaaagactaacttgattgcttgtaagctcaacccacgagtgtaatcagatgccattaccgacacataagattcaatcgcatgggtcaatacatccatacctgtatctgctgttacagaagcaggaactgacatgacgaattgagggtcaacgatcgctacatctggtgttaatgcgtagtctgctaatgggtatttcacatgcgtatcgctatctgtgataaccgcaaatggggttacttcagaacctgtaccggaagttgttgggatacatacaaattgagttttttctggtttgtcgatcttgtatgtccgtttacggatatccaagaatttttgttttgcgccaaagaaagatgtatctgggtgttcatagaacatccacatgcctttcgcagcatccattgctgatccaccaccaagagcgattactgtatctggtttgaaatcaaccatcatcttcgttccagcataaacggtatttgttgatgggtttggttctacatctgagaagacttcgatcttcacatcgtttttgcggcgagcaagaacttcgcgaacggtatcgcagtagccgaattgaaccattcctgggtcacaaacgatcatgacacgttcaacattttccattttctctaagtataatagagagttcttttcaaagaagatttttggcggtaatttaaaccattgcatattatttctccgtttcgctacagttttaacgttgatcaagttcacagcagaaacattacgagaaacagagttctttccgtatgaaccacaaccaagtgtcaatgaagggatcatttcattgtagatattaccgataccaccttcagcagatggagtattcaccaagatacggcaagctttcatgcgtaagccaaatgccaattgcaaatcttcattttctgtgtggataaccgctgtatgtcctaatccacctaaaccaagcatagcttcacatttttggaaagcatcttctgtgttgtttgctttgatcattgctagaactggagaaagtttttcgcgagataatgggtaatctgcacccacgccatctagttctgcaatcaatagtttcgtaccttcaggcaccttgatgcctgctaattttgcgatctccattgctgaatgtccaacaattgctggatttacagcatatttgccttcattcatcactgcatcttcaagtttttgcaattcttttggttttaccacgtatacttgatgagcttcaaactctgctttaacagctgcatagacttctttatcaacgatcactgcttgttcagaagcacagatcattccgttatcaaatgttttagaaacgatcaaatcgttgaccgcgcgtttgatttttgctgttttttcgatgtaagaagggacgttacctggacctacacctagggctggttttcctgttgagtatgcagctttgaccatgcctgcaccaccagttgccaatacgatggcgattcctgggtgattcatcaataagcctgttgcttcgattgatggatgttcgatccattgcacacagttttctggtgcaccggctgcgattgctgcatcacgaacgatccgcgctgcttctgctgaacatttttgagcagatggatggaaagcaaacacgattgggttccgagtcttcaatgcgatcattgctttaaagatcgttgttgacgttgggttcgttgttggagttaccccacagacaaccccgactggttcagcaatttcgatcaaccctttttgtttgtcttcattgatcacgccaactgttttgtcatgtttgatgctattccaaatatattctgaagcatacatatttttgattgctttatcttcatagattccgcgacccgtttcttcaactgccatttttgcaagcggcatatgtttgtctaaggctgccatagccatttcgtgtacgatatggtctactttctcttgatcaaagttttccatttcttttaaggccacgtttgctttttttgcaagatcatcgatcattgcttgtacatcgatcgtcacttctttttccaatgtcttagccattgtaatcctcctagttcgttaacaatttatttgttaattacttcacatatacatcatacaataactcttttcgtttgtaaacaatttctgtgatttttttcacagttttttaaaaataagttaaatcaagcgttttcaacatatcgagttattttaatctgatgtttaagtgactcgagtatccatgtgctttattgaacaatcgttgcttttatcaagctttttccaagaaaaagaaccgatatatttgattgattctcaaatatatcggttcttagtatgatggatactgattttggttttgcatttacatagatgaacaataacactctattgtccaattttgaaggagcgtgtttcttcagaggtgatttttttcaaaaattcactcaatagaatgattgtttgcaaataatcttctttgtggatgattaatcttgaggaatgcatataccttgtcggaatcgatactgtcattgcaacaactcctgtcattgctttatggatgttgcaagcatctgtccctccaacagtcatgaagtcatgccgataaggtagtttttgtcttactgcaatctcttccatttttgcaagcagttcactattaccgatcgttagcgaatccaaaacagagagtacaggaccttttcccagttgcaatcccccttgatcaaagggagtgtctacagcggtagtgacatctaacgcaatcgccaaatcgggcttaatgctgtgggcagctgtacgggcacctcgtataccgacttcttcttgagtcgttgccgcaaagtagacatcaacagctagctcttctttggctaaagcgttcatgacctcaatacagacacccacacaaactcgatcatcccacgctttccctagcaagtaattcggatcattcatttcacgaaagaccgtcttaggtgtaaccatgtcgcctaccattattcataactggcgaatatattcagctgacggaacccccatatctaaataaaattcattagctgggatcactttattcttttcttctggcggcatcccgtggggcacgcgacttccaatgacccctgtgtatttcttgccttccatcgttgtgacacgcatttcctgtgcgggcatgacgtgtccccaccagccgcctaccggtaagagtttcaaataaccttccttggtgatttttcgaactacgaaaccgacttcgtccatgtgggctgataacatcactttgggcgcattcgctttagaactcttttttactaagatcaatgaaccaaggttgtcataaaaacagaaatcaactgctccttctgcatatttcttcacgattctggatatttctttttcccggccgccgataccatcggcttcacttaattcttttaggatttctaagtctacagctctcatagggatcgtctcctagcggttttcttctttgaatgaaacaatcgctgcttcgtctaagtctttcagaaaaagatagatggcttgaccgactgtttcataatcttcttgcgaaacaacttgagctgctgtgttcatatttcttacaggcatgttcataaataagactggacatcccgtccgtaatttgttgaaccaagcaccgtctgagtcttctaatgagaaataatattgatatggcaatgctgcctcttcacagatttttctcaattcttccatcggcaaccgatttggcaaaacggaaggatcataatatgtcaatagaactccttttgagagttctccttgtacatcgccagcatcttcctgataatcccaggctcgatttgtatctaggatgatcgttaggtctggtgcaaccagattcgctgctgtttgagcacctctggcaccgacttgctcctgaaccgtacatccaacatatagatcaaaagggaagctgagttgattttcataaatttgacgtaacaaatcaatcgtttgattgacagaaatccgtccattccaatttggagcgatccattcttttccatttttgctgacagtaaatttgggcgcaaatgtcaccatatctcccaaagaaacttcttctgacaatgcttcctcttttgaagaaaaaccaaaatctaataaaacgtcctcttttccctgaacctggtttgctttgtttcgtcctaaaatgacgcctgggaaggctttcccttgtcgattgtacaggtggacttcctgtcccaataagctattcggctcgattttccccattatcagtccgcgaatcaagccggtttcttcgatttttttgacaataaacccaagttcatccatatgggcagtcactaaaacagtggttggattctccttttcagatttgatgaccccatagatcgaacctagattgtcatagatgatttcatcgcagtaaggtgcataatactctttcaataatttagagattgttttttctcttccggaaattccgggagttttgaccactttttcgagctgatccatttgtcccatctgctttaccactccttagtaacaatgttccttcacgtaatccgttgtatcttttttctctgctttcaactgacaaagagtcaacatttcgttcattgcttctgttaatccagtaccacccttttttggcatttttacaatatctacttgatctttaaatcttgtgattgcctcttggcattcaatggacatcgccgcaacagcagggatctgaaccttctcttcgacaactttcgcaacttcagcagccatttccccgtatgtttcataattaaaacatggaccgcaaagcaacacatctgcgcctaatttctgtaccattgcggcaatctttaaagaagattccttcgcatgctttcggtaatagtcatcaccacaataaatcgtggcaagaacctccatattcttttcctttaataacttttcgaacattttgacagaaccaatcgctgtcttttgcccccctaatggctgatccccatgttctttcccaccaagtccggcttgaatttgatccagcaaaaagattattttcattgtgatcccccttctataacaagtgatcgatggaaatatcatcaaacgacaattccagttcttcacttttggcttgttctgcttcccgttcatccttcaggtattgcttgtctaatgccataatgaatggatagtagatcaaacaaccaatggctaatagaatcaattgccagacagaggcaaccagacttcctgtactcaaataccctgagaagccgatcggggtcgtccatggcaatgaaacgccggttgtataaggaatgattcctaggttggttaccaatgttgataaaagcagattaaccattggaacagcgataaaaggaataataatgattggattcaatacgactggcaaaccaaagatgattggctcattgatcccgaaaattccaggaacgagcgaaagtttccctagttctttgatccgttttgatttacagaagaggaccatgatgattacaagggaaagtgtagaaccaccgccgccaaagttggtaaagaagttcgaaaatggatccgtgaagatgtttggcaaatctttaccagcttgaaaggcatctaggttttccatggttagaattcttaagatcggcgcaaatacagaattggctaccgccggaccattaatcccaaagaaccaaaaaatcgtacaggctaaactatagaaaatctgtgcggttaatgtattaccggctccttttaatggcatttgcaagacattaaagataaaatcatggacggtaccaaaaggggtcataccaaataatatattgatgacaaaaaataagagcatgactagtgcacttggaatcagcgcagcaaaggatttcgttacagcaggtggaaccccatcaggcatcttgatggtccagcctcgttttgttgtataagcataaatttctacagaaataagtgcgacgagcaaaccgacaaaaatcccatttgttcctaagtgatcaaaagaaagcccgctaattggatctgccactccttcaacgatcagcttatttggtgttaaaatcaaaaacgcaatcacggctaccgctgccgcttggatgggatcggttttcttttcccgtccataagcatacgccgttcctagacatgaaaagaagccaactgtattaaagacagaaccagaaacccgagtgacccacgactcccaacctgtaccaaacattcctgcccaaaactctgaccaccctggtattggaaaatttgcgaacagtaagaaaatcgatcctacaatcactaatggtgtcgtgatcaaaaagccatcacgcactgcgatcaaaattttgttctgccctaactttaccgcaagcggcatcaacacattttctaatttatcgaacattccactcttcctttcgagatcttgctctttgcaatcctctttttttgaaatcataccggtgctttgatgcgtgcttcatatgcatcaagccactcttgcgtgatcggtgtgatcaccgtggtttgatctggaccaggattggccatataaatagccgcttcttggtcagctgtcgcaacgctaaatgtgaattctacatttgttgccaccccccatgccccatttttatccaatgctatcaacgaaaaggcacctgctttgccataacgtttgcgtaatcgttcttcaaacccataaacagcccggtcacaagcggcttgtggtgaaagaccttctcccatcaagcggacgatttcataagaaagacagcctttcatcaaatcttcacccaaacctgtagcggcagctccgccaatcgtactgtctacataaaatcctgagccggataatggcgaatctcccactcgaccctgttttttcatgaacaaaccagagctagaggttccgactgccatttgctgttgcgtatcgagagcaacaacgccaaccgtgtcatggccatcgtaaggatcgaggttggaagcagcgatttctgctaatcgtttttcccagattttttttgcccgatcggtcaacatattcttacgttcaaatccagccaacatcgcgtattcggtggctccttgccctactcgaaagctattgaatttctcatcactcaattggcgtgcaactgagatgggattggcaacatcggtaatccctgcaacggcaccaatcttaaatgtttcaccatccataaaagcggcatccatttcgacgattccgcgttcatttggcaatccgccataaccaactgatttataaaatggataatcttccactgctttgatggcagtttctactgcatctttgcatgacgcttgtccttctaaaagttctttggctgccagtacaccatcgtgtgccattcgccaagttgcaatcattccccacatatctttccctccatcatttgtagcgcttacaagtatattctatatggtatatactagtatgtctatactaaaaaacgagtttctttcaactatcattgatttataagaaactcgtttcggattttttttattgttgaggattcatccagggcattcttattctgttaatgctttgatgctgcgcatgtagatctctaaattcatccgtaagtcagcactgtccatgtactcattcttattgtgtgcaatccctttttgaccaggaaaagacggaccaaatgccaagatattcggcattttgcgtgcataggttgcccctgttgtggttactggtttagggtcattgcctgtgactgtgtgataaatcgtcgacagtttagctatttcggttgattctttgtctcggcaaaacccgggaatactgcgaatgacttctaattcgacaccgataggcagttgccttttcaaacgggacaatacgtctgtttctgtaacagtcgctgggtagcgaaaggcaacttccatcactaatcctgtgagagacttttgtatcacgacaggcgtcaaaatcaatttaccagaatcttcatcagccagcgccaagtcaatcccttctccaaaatgctgctgatgaaagctttgacagatccaacgaaaataagattgtatggttggaggaatagtttgtttctcagccagttgggctgccaggatcgaaattgcattttctcccaattcaggagcattgcttggagaacgtttccctgtgacttcaaacttctgatcggcaatgcttacactcaagtcgtcaggaacatggtctcggaattgatccccctgaaacgaagtgagttgctgtagttcatcgtctggcagcggaaaatggagcgctacattgacgacccctcgttcgccatagactaccggatacttacaatctggcgtaaatccgaacacaggtggttgttctgcggccaaataatgaggaacatccgacataccactttcttcatccgtaccgaaaatgatccgcagattttttttcggttggtgtcctaattctttcaataatttcatcccataaaggcaactaatgattggtcctttgttgtctagaattccccgaccataaaggcggccgtctttttcgcttaaatcaaacggcggaaaatcccagtctgaacccgcaggcaccacatcgagatgtcccaggataccgatgtagtctgacccttctggtccccactgtgcatagccgatcgcatcatcgatcacctttgttccaaatccaaaagcggcacttttttccattaccaaagacaaaactcgccgagtttccgtaccatagggcgcctgtggcataggttcagatttgacactaggaacttgcatgacttgtttgagtaagtttagaaaatccagccagttttcctcaatggctgtgctgatttggtccatttttgccaccccttatttttgacgtaccaatgtatttttaaaggtatatttatctgcacgataaaaagatgtatcgaacaagatcggtttcgcagaaggggaataagtcatcgaatggacgagaagcattggttcctcttcggatacatgcaatagcttggcaatgtctggcggacttttgaccgcttccacttcttgatgggaataaccaatctcaatgttggcttcgatcacttcatataaagaagactctaactgatctttggtgatttcgccggactctttttctaaataacgcttcaatacatagaggttctccaccgtcatcggttcatcatcaaaataacgcaaacgagtcagatacaccattggttctttcccatagttgccgaacatctgtcggatcttagtcggtaattctttcactgtctctacttgtaatacttcggttcgggtctttttcccttgggctttggccgtttcggtgaagctttgcaatccgccagatccactctggatctttggctgcttcatcacatacgttcctttgcctttttctttgactaggatattttgggtgatcagaagatcgatggctttgcggacagttagccgactgcattgaaattcttccgctaaatcataatcagaaggcagcttctgactcgttacataagtgccatcattgacacgttgggcgattttatctgctacttcctgaaaaacggcttgttttttcacttgattccctactttctactctaccattcataaaatggacgattcgcactcacaccagaagccacactaacaaaggcctggttgtcgacggattgaatcattccttcaactgtctttaattcttttcgggagatgactaaaagcaacaatttcttctgttgatgatcaaagcccccctcaacatcattgatcactgtgatccctcgctgaagtgcacattgtaatgttgcaatgacaccttctgctttttcggttactactagtaattgcacacgcctttgcttgagattcacgtagtctaccattcgaccactgataaagaaagagattgcactataaaaagcgtacggccagccaaaaatcattccagcaacgagttggagactgacattgaaaaagataaagaaactgccaatacttttgccggtcattctcttcactaagatccctaaaatatctaatcctcctgtggaaaaatcatcgtttaaagtcagaccaacggaaaacccatggagcacaccgccaaaaacagcgcagatgactggatctgtagtcaatgtgacaactgggaccaccttcatcataacagatgagaggaagacagtacaaaccgtcataagcgcgaaatcacgatcgattttgcaccatgcaatcgctaacaatggcgcgttaaaaaataagaccaacacagggattgaccactcgttaccaaagtatacttccaagagctgcgacaataattgtgaaagtccagtaattccactggcaaatatatttcctggcagccagaacatattcaatgcgatggatgataacagtgcataaatgagtgcaacagctaatcgttttattctttttggcataagcatctccttccgcttcgattatagtatatatcattaagtatatactgtcatcaaaaaacttattttctttaaagaaaccgcctttgctgatccatagtctttctcaggatcgaggggtaaaatttatcctgacatgcgggctagaaaaagagagtaaaatacttgaaaaatgactaattttgactaaaataataattggaaagaaaaataaagaaaggattgattattatgtcacatgagattgaacctcgtcgctcagatgcctatagtatgacaccttttaatttcttcgaagattttggtcgcagtttttttgatggttttaaagcgaacatgatcaaaacagatattcacgaaaatgattcggaatatctcgttgaagcagagctgcctggtattcctaaagaaaatattcaagtcacttatgagaatggtattttgacgattgctggtcaacatcaatcggatactacgactgaagataaaaaaggaaaactagtacgcagcgagcgtagtttaacaagtgttcgtcgccaatatttgctagaaaatgtcaaagaagacgacatcaaagcttcttattctgaaggtattcttaaattgactttgccaaaagatgatcacggcaaagaacctaagaaaaccattccgatcgagtagcagcatcacttttaccaaacaaacagcccccttaacagaaatgcttgttaagggggctattaatgtagaaaaagacctgttctccatgctttgcttgctgatttttttgctcttgctaaagaacaagcgaaaatctggacaaacgccactctataaaaaaagaggctgggacagaggtgctaaactcctagaaataagaaggaatacgcggaaattgcttctcaaattttggggtatttcgacttgtttccgaaggagttgcttctgctcccaccatctagacgtgtttagagcgtgggacaaaagttttttttacttttgtcccacgctctagtcctagctgtctttgtcagacggatcgaaaaaattattcttttgtatcgtctgcttttgtttcatcaacaacatcagctggttcgatttcagttgcaacagatgcaccagtaccaggtgtcacggtacgaatcgctgcccgatcgaactctaagaaaataccttcacagtcgatgacaactgtactcttgtctgtatttacttcagaaagaacgccatgaagtccgccaattgttactacgcgatctccagccttcatattttccaataagttttttcgttcttgctgttgtttcttttgtgaacggctcatgaagaaccacattgccaccaaagcaacaagcataaagagcattggtaaagattgtgccatttttttcacctcgatttttttacttttctatagatactttatcagaatctgacgtgtattcctaccgttttaccagaataaattagaaatttttggcattttctttattgaagccatattcttcgaagaaatgttgccggaattccagcaagttgtcatccatgatcgcttgacggacttgtttcatcaaattcaacaagaaataaacattgtgataagaagttaatcggatcccgaatgtttcatcacatttgatcaaatgacgaatatacgcccgtgagtaattcttacaagtataacaatcacagttttcatcaattggtcggaaatctcgggcaaactgggcattcttcacgactaaacgacctttagacgtcatacatgttccgttacgggcgattcgagtcggtaatacgcagtcaaacatatcgaccccgcgaataacgccgtcgatcagagaatctgcggctcctacccccatcagatagcgaggtttgtggtcagggatccatggtgtggtaaattccaagacgcgattcatttcagcttttggctcgcctactgacaaaccgccaatcgaataaccaggaaagtccatgctgatcaaatcttgcgcactttgtttccgtaaatcttcaaaaccggccccttgaatgatcccgaacaggccttgagaatctggattggcatgagctttcaatccgcgttctgcccagcgagaagtccgttctactgattttttgacatactcatagctttcatcgaatggcggacattcatcaaaactcatcatgatatccgaacctagtttgttttggatatcgatagctttttctggtgaaaggaacatttttgaaccgtttagatggttcttgaaatggacaccttcttcaacaatatttcgcatatctgctagtgagaaaacttggaagccaccagaatcggttagaatcggctgatcccaattcataaacttatgcagcccacctgcttcggccactagatcttctcctggtcgcagccataagtgatatgtattacttaaaatgacaccagcgcccatggctttcagttcttccggtgcaagggtcttaacagtagctaaagttcctacaggcataaacattggcgttggaaaagtgccatgcggtgtgatcaattcacctaaacgggcacctgtatgtttctctttcttgatcagacgataacgaatggcaggttgcgacattcatttccctactttctttatagactcgattaactgtgcaacgctattaatgataagggttgcgttaggaatttgcaagaaggtttcagcttctcttcctctttttcaaaaaaactttcctttctttgctttattttttgtacaatccatgctcatttgctatcatgttaaacagatagaaaggaggtttttttatgaaaactagaggacaactaaaaagtgaagccaaatccgttctgaatggacgctggaaagatagcgtattgatgtgcttggtccctacgttgatctctattgcttttgctgttgtgatcgtagtgattgttgtgttgcctttgatggcattaagtcaaaatggtgcctttgatagtcaatccatcaatgaagcgtcgaactcaactggcggtagtggcggtggcttgatcagcggattattctcagcattgtttggtgccgggatttcttggacattccttgatttgttacgcggcaataaacaagagattcgtccattttctgatgtctttcgtggatttagcggtgtattcgcacttggtatcattgtcatctatattttatcaacgattttcgttagtttatgggcattattatttgtgattccaggaatcatcaaatcctattcctactcacaagcatacttcatctactatgatacctatgagcaaacaggtacacggccagattttcttgcttgcatcacggctagccgccgattgatgaaagggtataaaggaaaactgttcttacttgatttgagttttattggctggcacattctagccattatcacagctggtatcgggtatctttggttgacaccttatatcagtgctaccaaagcagccttttatgaaaacttgccaaaacagacattagcttaaaaaaaggaccttactttgacatatcaaagtaaggtcctttttgattgaatgaaaaattgttctcaacgtaatgtttcttccgttaattgacacgttttgcttccacagcatctttgactgaattcgcaacgattttggctactccttcttggaaagcatccggaataatgtttgttggtgacagctcctcgtctggaatcaagctagcaattccttttgctgcggcaatctgcatctcaaccgtgattttgcgggcttgagcatctaaagctccacggaaaataccaggaaaagccaacacattgttgatttgattgggaaaatcactgcgtccagtaccaatgatataggcacctcctgctaaggcttcgtctgggaagatttccggtactggattagccatagcaaaaatcacaggcttatctcccatctcagcgatccattccttcttcagtgctcctggagcagaaacaccaatgaagatatcagcacctttcaacgctgtctgcaaatcaccagaaagatggtcacggtttgtcactttagcaatctctgcgtgatgaggtggtaactgatcattttcttcattcaagatccccaccttgtctacgacaatgacattttttgcaccagctgccaaaaacttacgagtaatagaaagtccagcagaaccaccgccattgacaacgattttggcttctgctagtgatttgccaatcaatttcaggctgttgaaagcagccgctaagacaactattgccgtcccatgctggtcatcgtggaaaatcgggatcgcacactcttcgatcagccgctgttcgatttcgaagcaacgcggcgcactgatatcttctaagttgattccaccaaaggtcggtgcaattgctttgacgatcgcaataatctcttctgtctcttgagtatctaaaacgataggaatagcatctacatctgcaaatcgcttgaacaaagcggctttcccttccatgaccggcattgctgcttctgctccaatattaccaagacctaacacagcagaaccatcgcttacaacagcgactgtgtttttctttgttgtcaatgaataggccagctgtttatcttctgcaatcgcggaagatacggcagcgacacccggagtgtaggcaatgcttaagtctcttcgattttcaatcgccgcttttgatactacttccaatttaccgccatgttctttggcttgtcgcaaagcgatttcttttacatcttctgacatgattcgttcctccaatagttgatcgttttttctattttttattaaaaaatcattcgcaagattgcggtcatggcaatcactgtgatggcgccgcctaaacgggtagctacttgggcaaaaggcatcaagttcatacggtcagcggtacttaagatcgctacgtctcctgtgcctcccataccgctttgacaagcagaaataattgcggcttcgatgggatacatgttcatgaaacgtgatacgacgaacccggtggcaattaccgtgaacactacactgatgacgactaagaaataagagacactcagtgttcccacaacgtctttcaatggaatatacaacaatcctaaaccagccatcaatgggaaagtaaagttgccggaaataaatttatacaattgtttggagccatgttgtgtttctgccggcaccacattcaagtatttcaaaaaagcggctaagacaatcatcaatacaggaccaggaaacccagtcaaatgctgcagtaaactaccagcaatgaacagtgtacaagcggtcagcacaccagcgcccattttcttgatatcaaaagcgccggaatcatcttttaacgcatctgccatgtcatcatcatttttcattttgaccaattgtccacccccagaaagatctggtcgtttttctccccagcgagagagcaatgcggtacacatgatcgcgaagaaattaccaatgatcgttgctggaatcagttgtgcgaccagctgttcactccccataccagtaatggcactgtagcctagtgataaaggcaagattccttcaccgatcccgccagctaacactggagtaacgatgaaaaacaacgtatgttgccattctaaacctaataatacaccaactagcgtaccaacacccatggcgcagatcatcccaatcatcatgggaataatcatccgcatcaaaccttggactaagattttgcgattcatccctaaaatactgccgcaaactaaacaagcaatataaaaatataagaagttggcttgcttcatcaaaatatcggcagactcaagaatattcggattgactaagttgaagaaaaccaaaatagatggaaccaataaagataaaattgccggaccaccgaaattcttgataaaaggaatagtggcaccaatcgttcctaataaccaccctaaagtcaaaatgaccgcaaaaccacctagcatatttacgggtaattgttgtaacagacccgtgactacgatgactgttgataaaacaatgtatactggcagcggaactgatccaattttgattttcatccaccgatcaattagcttctcttcttttgctttagattcaacctgttctctcgccacatggggttcgatatgcttttccattttgctttcctcctaaattgatctactagttctacgagtacctcgttacacacagattaaagcaagcgttttctttttcgtagtttatttaattattttaagtatttaaattaattaaagcgtctttagggattccgccgctatgttataatttacgaataaagggggaaatgtagtgaaaaaagggttacggttatggggggtattgactttagtctttacaatcgtcttactcattgtcacttccattctttatggtttagtccttattcaaaattccacatttattcgctccaacgaagaacacctgctcttgtccgtcggtaaacagctggcgatcgatccacaagtgactaccgctttggaagaaggacgttccaacgatcaattggaagcttacacaaatgaagtgacacacatacacgggttggatttcgtggtagttatggatatgcaagccattcgtttgactcatccagatgagacccaaatcggcaaacacttcgaaggcggtgatgaagtcactgcattggaaggaaaagaacatgtttctgtcagtgaaggaacattgggtcgctcgttgcggggattcgttcccgtctattccctcactgaatcgcaaaaacaaatcggtgtagtagctttagggatccgtatgcagtccttgagtgctttagtaaagagttctcgggaagggtatctacttgccttagcattaagtatcacaatcgccgcctttgcagcaactggacttgcctattatttgaaacggcaacttcataatttagaaccaaaagaaatctcacgtctctttgaagaacgcaatgccatgttggaagaaactaaagatgcggtcattgtattggatttgaaccaacaaatcaatttggcaaatatcgccgccaacgagctttaccaaaagaacagtggacacaatgactccttggtcggcaaacatttgcaggatttgatcttgcagaccgatgctgtagacttggagcgaaatgttgaacagctctatcggcaaaatggacaggattttcttttttcctctgcaccgatcaatgtggatcagaaacggatcggttggatcgtgtttttgcgcaatgcgacagaatcgttattcgtcatggatcagttagccaatactactgcttacgccagtgcgctgcagtctcagtcccatgagtttatgaataaactgcatgtgatctatgggctcgctgatttaaaagcctatgatgaattgaaaatttatctggatgatattttgactccagaaaaagagttctctcatcgcttgtcttttttagttcagaatccgcaagttgctggatttttgattggcgaacgtcaaaagttctttgagcgtaaaatccacttgatgatcgagatttcaccagaaattcccgccaattcgcaagaagttgaaacaaaatcgttgatcgatctttaccggtatattcatcatgttttgttgcaactaaacaccatagaagatttgcggatcgagatccatcatgaaacaggcctgctgacaacgacctataccattcagctgaccacaacggatcagcagcaattgcaggatagttttcacagcaactatttccaacaaatgttaaaagattaccaggcagagtttttgatagaagaacaacctaactttgtcgttctccaattacaaacgcattatcatggggtgataaaatgaaaccattacatggattaattgtcgaagatgacccaatggtggaatttatccatcggaattatttagaaaaaatcggcagatttcaagaaatctattcggcagatgctgtgacagatgctgaatacttactacaaaacaaacaagttgatttagtgctgctagatgtccatttgaaaaatggcaacggcttagacttgctcaaagagatccggaactctcagcaagccatcgaagtgatcttgatcacagcagccaatgagacacaaactattcagcatggactacatttaggtgttctggactatctcgtcaagccctttacctatgaacgtttccggcaaagcatcgaactatttctaaaacggcaagaagctttggaacaagacagtcttgcccaagaaaccattgatcaaataatggttgcaaagaagagtcccgagtcatcccttacagaactggataaaggactctctcctgataccatggatcgcatcaaagcggctatccaaacatttccagacactttcacgatcccagacttggtagagatcagcggattttctcatgtctcagtccgtaaatacatgctttacttagaaaaaaataactatgttaccagtcagattatctataccaaaatcggacgcccttataaagtttaccaacgatcctaacaattagtggactctctctaggaacgtcaacgagtgattgctgatttgctgattattgaataaacgatgttttagtaagtcagctttttagattttaaattgtgaattgatcgttgtactttgtataccctatctatttgcaaacgcttcctaaatatgctatagtataggtgtaaggaaggtagcaactctgttggtggtcttgtaaatatcgcaaactcaatctactaaaagttgttgaacgtacaagtttcacctagtatcaagcgtgtaaagtaacagaaaagcgtaacacaaaatcgagaatcttttcgaaaaaaggatacgtctattacgttgtatcagtacacacgaaacatgtgtaagtttgtaaaagaaaacaaattttgagaaacaattgctttgcatgaaccaaccatcagcgaccaccacttataccttcccttagttataagctggacgacaaaaaagcagttcaaaaagttgagaagtatcccaacttaacgagccgctcttgtcgttcagttttttattttaagaacatggcatcgccaaaactaaagaagcgataacgttcatcgatggcatgctgataagcttctaatgttagatcgcgtccggcaaaggcactgaccaacattaccaatgtcgatttcggtaaatggaaattcgttgagaaggcttggacaactttgaactgatagccgggggtaatgaaaatactcgtccagccgctgtcggctttgatatcgccatcaaatttggtaccaatcgtctctaatgtacggatcgaagtcgttccgaccgcaacgattttcccaccatttgcccgcacatcgtttaattgagccgccgcttcttccgtcaatcgataaaattcactgtgcatttcgtgatccgcaatattatcgacgctaactgggcggaaagttcctagacccacgtgtaaggtcaaataaactaatttgacccctttatcagcgattttcttcaataattctggcgtaaagtgcaaaccggccgttggtgccgctgcagatccattctctttagcataaacggtttggtaacgatctggatcttccaatcgttccttgatgtatggcggcaatggcatttcacccaaagattctaaaatctctaagaaaatcccatcatagctgaatcgaataattcggccaccatgttcgagttctttttcaacgaccgcttctaagcgaccgtcgccaaaggtgatcttcgtaccgacttttgctcgcttggcaggtttgattaatgtttcccaactgtccccttcgatattgtttaacaataaaatctctagatgagcgccggtctcgattttctcgccatagatacgagcgggcaaaacgcgagtatcattcatcacaagggcatcgccaggagctaattcatcaataatgtcataaaaatgtttgtcttccattgcaccgctttctcggtccacgaccaataggcgggaactggagcgatcgctaagcggcgtttgagcgatcaattcttccggtaactcaaagtcaaaatcttctgttgtaagcatgtcgtcactctctttctttcatatgcccgtctattctatcatgtttagagattactcgccaattaggaaactaggcatagctttaaataaaaagagcgctagagagagactagaaccttttcacggtgctcctaatctattagagaattttaaccgataacacggaatcttctgccttttttatctgctttatcgttttgtgaataaaacaaaattttttcacgtgggattttttcttgctgagcacattttttcaatgtgtcataaacataactgctgttgtttttataaaaaaccatgacttttttcgagtcaatttctttgcgatagtcttcatatttctttcttaatcgttcaacttctgtaacaatctctgaatctttattccaatcgggaattgcagtaagcaagcaaattcgtttccagtattctttttccattattcaaactaaccacgaaagacatttaggttgaactgctaacctatgctttacgaatcacttcgtctctatcgattcacttctatcgaaaattcataaagccatcctttcattcctttcttaatcgctccaaggagaactatattcaaaaaatgctacttgttccattacttgtcctattcaacactgggataattaagaataatacgataattatcaataaccgctttgatgttttggccgtcagcaaaagatacttcaaatagtggactatctttttttattgaggaaatttcaatgtttagatacttaaaatatgcccctaaaattttctcaggatctatctcttgaaatgattgctctgggtaatatttaaattggacgattttattagtcgattcctcaatcagggcttccccataaccttcgatcgaagaataattgatttgccaataaacagtttccgaatcaatctttagattctgggataacgtaaccaagtattctgaagagattcccatttcttttagcagcttctctatttccaccgcatatgtattgacatactggcttccttctcccgtattattatattgcgttactttcccggcgttcgtgagcacttcttctaatgtacttttatttgaaggcagctccaaggattcttcaaatacgactggctttgacaatgaatctgtaaacagcatatttggtaaaaatagtagaaatacgttgaaaccgacccataggaggatcagacttatctttattcttttcctcatcttcagtcctcatctaaaggaaagtcgatcgtaataaacgttccttcacctttctcactagtgatcgtcacttgcccttcatgaagtgagataatattcttcactaatgaaagccctaagcctaaatgcccagaatttctagtgacatcccccgtaaaaaattcatcagtgacttgatcaataatctcttcgggaattccctgaccagtatctttcagtataaaataatatcgtccttcattactgtagccagtgatgcacatctctttcctatccttcatcgcatctaatgcgttagaaaatatatttgcaatgactaatttaaataggttaaagtccattcgtatggtggccttttgaagagtcatctgcaaaaggatccgctcatctaatccagagacaaattgagtaatataagagtcaatctggtctgtcgatattgcttcgagattcatttcatttttcttcgagtacaataaacgcaaaacatcttctgataggcttttcaagcggaaactttcttctaaaatataatcgacaaattccgaagaaggttcctttagatcctcccactgcaacatttgcgcatagccgatgatcgacgttagcggggtagaaatttcatgggataaacttgagacaaataattcttgcttttctttttcctgactgatttgttctatgtcttgatttaatttattggccatgtcgtttaggctgttggcaagcttttcaacttcatctccacgtttttcaacaacgaaaggctttgttgtttgcccttttgcaatctctgttgcgcgatcaatcaatttttgaatcggtttagtgatgagggttgataaaaaccacgacattggaatcaaaacgatctgcaaaagaaataaaatcattcgaaaataatgacttgctttcttcagaatactttgataagtgattagattctgcttagacaccaaataatagtctgtcgttccaattgtcgagcttgtaaataaaaacttctcttgtttgattgtgatgattgggctaatgttgattgtgttcttcttaattgaatcgtaatcaacaacctctgttatgcttggaaagtcagttgtactggcatacacactctttccttctttatccaaaatttcaaaatcattctttaccgtgctcttgactatatcacttagattccgtaactgctctttcgtaggttcttgatcttcaattttggctgcaaatagtatcgcagcacttttttgggtagctagtgcttgatcatattcctgattgattgcatgttgagcgatgatccgcaaactgatggtgctgatccctaaatacaaaagtaaaaaaaagaatagcagccaatagaatgcttttgtcgcatatttcatcttattcctccaataagtaccctacaccataaatcgttcgcagctcgttttccaaatgcagtttctttctgatccgctgaatgtgtaaatcaagagttctgctatctggctcacttggcgattcccaaattcgttgataaatcgtttctcgctctaaaataattccgcgattttgaacgagataaatgaacaattgatattctttaggcgtcaatgcaatcaactcattgttaaaaaatacacttctcttctcgtcttcaatacggatgttgtgccaatttatctcagaaacagaactctttttccttctgcgaagtactgtttcaactcgagcaaataattcttctagttcaaaaggtttcgtaatgtaatcttctgcacctaactttaatcctcgcactttatcatgcaaggtattcttggcagttaaaaagataactgggatatcaaattcgacaaaatagtctattaattcatccccacttatttctggtaacatgatatctaaaagaatcagatccacctcatgattttcaatgtaatctgcggcacttttgccatcaaaaatcgggatcgttcgatagcctttttttgcgaggctttttactagcaggttatttatggcttgattgtcttctactatgagtacatccatttgatttcacactttcttcccaatttttgtaaagaagctgttttataagctgatagccgatcatgataccgcacaaaaaaagatagagcaaaagtaaaagtacgatcgatcgattgtcaatatcttcaaaatcagcgaaaattttttgaagcgcttgattgtgacgcacaaaaatatctgtactattaagacgggtaaatcgcccaatataaatcccaatagaatccataaataaaagacacgcaatcaaaagcgctgggtagacaccaatggttaatttctctactaatattcttgcaatcttgtcaatgctccagcagcccaaaattgttgaaggcatcactgccaacaaaatcagaaaaagtttgatccaattcattaaatccttacttatcaacaatgttacttcatcataaggtgtcaataaagaaagatgaaatagatctgtcatgagataaaaattatttggtaaaaaaacaagccagagacacacaactaccactataatgtacttttttttacaatacattgcaagaaaggttaattctattggaatatatgccaaaatagtattagtaaagaaaagaaaatagacacttgattgataaaatgaaagatataagattcccagtaaaatcaaataatataaccgaatcccattcattgttttatttagtaaatacatggttcctcctgtcttaacgcgctctcctagccattgtcccactatttagaaagaacagacttcattaattgggcataaacactgcgtccttccccattcaaatgagtttcatcatcataaaagtattctgggtggtctttgctgtggctaaaccagtcgatgatattgacattcttgtagcgactaggaagctctgctaatttttgattcacagattcttgacagccttccggacatttgatagttatccagtatatctgtttatcctttaattgagtaaggatttcatcgattgactcatccgaaataataccatttgtacccagtccgattactaccgtcgaataatcagctaaattgggatgcccttgaagaatcgttgccaaactagatatttgccgtgattctttcgcatcaacggttgcttgcccactaaacgtatcttccaattcttgatatgctccaagcatcacagaatcccctagaaataagatatttcctttttgattgggttgattctctatctttttcagattactgcttaactcttgtttcaattcgttttgatccgcagtcagacggttagtcggtgcaaaaatgatcattccgattgcaacagcaacaagacctgctccaaggtaacgtcctgcttttctttttaaatgcatgaaagaatgaaagccagcaatcatcagaaccgtcatgatcagaaccactaccaattcaattagaggattcatcttaggtgctatattcactaggagaataaacaccgaatagtgaaccaaatataattcataactaattttgcctatatattgaagacggaatttggcgattttggttcttttttccacttctttgtcatttatcaaaacgagtaatagcattgttaatacactgacaagcaatgagctacctgtaaacgaaggcagcggaataaagacagccagagtcaaacaactcatgatgagccaaaacttcgttactttttttgaagaaatgacatcattaatgttctttctattgaaaaaaccaaacatgccaactataaacggataaagtcgagcaaaggtattgtaataagcgatagaaaacggcgataacagactggtgagaatcgaaataatggtaagaagatacataagctgatagcctctttttctagacaaacgcatgactgttagaaagaagagtggaaaaactagataaaattgtaattccaccgccaaagaccagtaatgtttaaatagggacgaatttgcgaagcgatcaaaataagagactttttcgtggatctgccaccagttgttatatccaaagagtaaacttggaagttcacttttgatgtttcctagcattcggatttgaatactcccagctatcagaataaagataagtaaggagaataaaagaaacggataaatccgtttgatccgtttcttataaaagccaatccaggagaactgttttttttgatacgcataggaagcattctttgccatcaagtaacccgaaataacaaagaaaatcgttacgccttgatttcctccttgaaaagaatattgaggcaaatggtagagaataacagcaataaccgcaaatgccctaagaaaatcgttgcctgctgaatagtgtttatccatgtttaacctccggctggccgatgatcattttctccgtaataagtctcattgctggaaggattattcaaaagagtagctaaagacacaaattgataatcttctttttttaaatcacgaataatctcagggactgcagcaatggtttccggatgaatgtcatgcaacaaaataatcgaaccatcatagacagaactcgttactttatcaatgatcatttgggcatctttagatttccaatcttctgaatcaacagaccattggatgatgggacgattgatcaattctgcagcttttgcattgacagaaccatatggcggcgaaaataggctggttttttgcctgtgagtttcttgatagattgatcggtcttcgtgatctcattagtcattccagattcgttcaatgtgctgaggtcttgatgatcataggtatggctaccgatagtttggccatcctttgcgatggctttcaccacctcgggatacatctctacgttctgtcctactaaaaagaaagtagctggcactttttcttttttcaatagttccaataatttaggtgtattgctgggatctggcccatcgtcaaatgtcaaagcgacctttttttatttgaaggaatctcctctgtctctgtagtgctttctagtatattttccaaactagtctctgtagtagccttattgttacttgtcactgttcttgaagaactactgttgcttgttaactcggaggactgggacagattgttctctgtttttcctctagcaaattcctcactgattcgtgcacagccgcaaagtactaacaaaaagataaagccagttatgagtaaacggatctttttcattgcttttcctccttatttgttgtcaatacatcatgaactcttgctatctcttctgtcgaaactgtttgataagagattccattctgaatcaattcctctccgatcacttggtcatgaataattgttggctctttcatcagtttcttcgcatgaagaacaagattggtaatgggtagattggttttgatgttatctgtcaagatatcgataaatgcattccattttgtgacttggttcaattgcgccatattttccaaaacacctttcagtaacaactgttgccgcatttgtctgccatagtcccctcgtggatcctcatacctcattctcgcccaagaaagtgcttcttctggagataacgttagtttacctttaggaaaatcgaatccatcagaactaaactcaaattcattttctacttgaacagctcctacttctttgagaatcttttgaaaatctcccatatcaatagaaacaaaataaggaatttgaatatccaacattttttctactgttttaacggaacagcttgcacctccataagcatacgccgcatttaatttatcctgcattccttggtctgcgatatcaactaaaagatcgcgttcaactcccattaatgtgtattctttcttttttaaattgatatgagcgactatcatactgtcacttcgaccagaatccgttcgcccaaactctccagtatcaacgccaagtagcaaaacattaaaaggttcttgtttcaattggtcgtaatctaagtcatactgctcatctgaaggattcaatttttcgtacacttttgtatttattttatttgcagaatagactgcccagccagtaataccaccaacaaggactactgaaacaaaaagcaaaataagaattattttccgcatcggaacacctcctgctgctaaattaaaggaaaaatgtatctgaaatgtatcgatttagtatttggtgactcgatacatgctcgcttgtagcagcaatgttcgcttttaatttaatattaaaatgttgtatatcacttttagtgaagaagaaagtctactcatccccatttaaaaataacaatcaaaatgaagaataatgcatatattccctattggattttcatttcgattggatttgtttcaaacattttgcttataatatgcaaatatgaataaaaaaggcagaatatttgaataacagcaaacttttgggcatactaattacagaccctaggcgtaaataagctgcgcctaaataaaactagaggtgaaatcatgattgaatttcagcatgtatccaaaatctataaaggcggcaaagtggctgtcgaagatgtcaatctatcctttgaaaagggagaatttatttgtttcattggtaccagtggtagtggtaaaactacttgtatgcgaatgatcaaccgtatgacagacccctccaaaggaaaaattctgattgatggcaaaagtgtgaccgatatcaatccagtagaattacgacgccaaatcggttacgtgatccaaagcatcggcttgatgcctcatatgacgattcgagaaaatattacattagtacaaaaacttttgaaggtcagtcaagaagaacgaaataagacagcagagaaaatgatcgatctggtggaacttcctcgtgaaatgctggatcgttaccctcacgaattatctggtggacagcaacagcggatcggtgttgttcgggctctggcagccgaccaagatatcattttgatggatgaacctttcggtgctttggaccccatcactcgcgattcactgcaagatttgatcaaagatttgcaggaacgtttaggtaaaaccgtcgtcttcgttacccatgatatggatgaagcattaaagttagctagccgcatcgtgatcatgagcgaaggacgcgttatccaattcgatacaccacaaaatattctgcgaaatcctgctactacctttgttgaagaattgatcggtgaagaccgccttctgcaagcaaaaccagacaccacaccagttaaagaagtcatgctcaaaacaccaatcgccatcactcctgaaaaatctttacaagaagcgattcgcctgatgagagaaaaacgggtagatacattattagtgacggataatagcaatgtcttaaaagggtatatcgatgtagaatcgatcgaccgcaatcgaggcaaagtaaccagtgtcggggatattcttaataaagatgttttctatgtaaaagaaaccgccttactgcgagatacgttgcaacgaatccttaaacgcggtttgaaatatgtgccagtcgtggatgctgagaatcatttggtaggaattttgacgcgtgcttcattagtcgatattgtttatgacgttatttggggcgaggaatcctcccttcttgaagcgatcgaatccgcaaaaccagaggaggtctagccatgcaaagcttctttaatgaatatggcggccaattggtcacgaaaagcattgagcatttatacatctcctttgccgcactatttctaggcattgtcgttgcagtccctttgggcgttctattgacacgctttcccaaagccgcttctatcgtgatcggtgtgactagtgccttgcaaactgttccctcattggcactgttggcattgatgatcccgattttaggggtcggtaaggtcccagctattgttgcactctttatctattctttgctgcctattttgcgaaacacctatattggcatgaagaaagtcgattggaattatcgagatgtcgctaaaggaatgggaatgactaacttccaatcgatcattagtgtggaactgccgttagcgatcccaacgatcatggcaggtatccgcttgtcagcagtctatgtcttagcttgggcaaccttggcttcgtacattggtgcaggggggcttggagacttgatctttagtggattgaataactatcaaccggcattgatttttgccggcacaatcccagtgacgatttttgcacttttagcagactggttactcggattacttgagaataaactaacaccagctgcattaaagggggatgcctaaatgaaaatcaaagcgaaatttggtcttttgttatccatgatcattattttactctcaggctgctcctttccaggacttgcttctacatctaatgaagacaccgtagctatcacaggaggaatcacttctgaagctcagattcttggcgctattgtagcaggaatggtagaacattatacggacaaaaataccactgtcattaataacttagcaacaacgacaatcaatcatcaagcaatgatgaatggcgatgcgtctatctctgccgctcgttataccggaacagatttgacaacaacacttggcttagagccagaatctgatccaactgctgcctttaataccgtaaaaaaagaatttgagaaacgttaccatcagacctggtttccttcctacggctttgataacacatatgtttttctagtcagaaaagacactgcagaaaaatataatctgaaaaaagtcagtgatttaaaaggcgttgccgatcagttggttgctggtgtcgatacagcttggatcacccgtgaaggtgacgggtatgatggctttcaagaagcatatggcttttctttcaaaaacattttgcctatgcagatcggtctcgtttacgatgctgttgacaacggaaaaatggatatcgtactcgggtattcaacggatggacggatcgctagttatgacctcgtaatgttggaagatgatttgaatttctttccaccttatgatgcagctccagtagtcgatgacaaattaatcaaagacacaccagaagtagcggacgccttgaacaaacttgctgatacaatctccactgaaaaaatgcagcaactaaattatcaagttgataatgacctgttggaaccgacagtggtcgcagaacgtttcttacaagaaaataattattttgaaggagagtgacgaaatgaatgacatgaatctatttcaacaatttattgcctattttcaggaaaatggcggttatgtctttgcacagtttgttcgtcacttcctgatctctatctatggcgttttattcgctgcaatcgttggtattccactaggaatctggatttctaaaaagatgcgtatggccgattgggtgatccgcatcgccaatatcatccaaacgatcccttcgctagcaatgatctcgattttgatgattggaatgggattaggtgtcaatgtcgttattctgacgatttttctctactcgctcttaccgatcatcaaaaacacctataccggcatgcgccaggtagaccgtaatacactagatgttggtaaaggaatgggcatgacaagttggcaacgactgtatatgatcgaattgcctttatccgtctccgtgatcatggcaggtattcgtaatgcattagtcgttgcaattggaatcactgccattggcgccttcgtaggtgctggtggcctaggtgatatcatcatccgtgggacaaatgcaaccaatggcgcttcaatcattcttgccggagctttacccactgcattgatggcaatcatcaccgacttaggcttaggctttattgaacgtcggttagatccagcaagccgctcgtcgaaataaaggccatttcttagcgcttttataaatatagaaaacaagcatccttacatacaagaaggatgcttgtttttctatatttattaactaattcactcaaagcaggtgaatgcgcttctcgattttccctgagatgatcgggaatcacgcatcatatcctagaggtggttgtttcaaggctcgatccatacaaatggattggcgcccatcgttttgcttgagggacgactggtatgccatcattccatacttgatactgatatggggtcgttttttctcgaacactgctctgatcgctactccaaagatcattctgaagtttggtcgcttttaagttgtacgcttcgtcttccccctactttcttttgggactttttttccgatgaaccccatgccgttcgggtccattcctgataaacacaagacacattcttcagaatctgtctcataataagctgtaaattcatgcccctgccaaaaatagctcttctccatttgctgaatgtctgtaagcatgacaaattctgaagaaatgagactggactctgctgtaaactgaataatctcccacgttcctatgaggtcctctttcatagggatttcaggaattgatttcgcataactaattgctgatatgaccggccaaccactatctaaccaataaatttttctgacatctaaaaagaaatcatcactaaaaggttgtctccgtgcatgatgaataataaataattcattatctgaacgtttgaatatagaattgtggccaggtgcatagactgcagactgttcttcgaattgataactccctagtaatttaacaccaattttctccggtaccgcctcttgttccgacagagacaggccattccaatccgtatagggaccggtaatctctttcgctcttgcaacccggatattataggtttcattcaaagaatcaaaagagacaaataagtaatacatatccgtttctggatgataataaacaaaaggaccctcaatcgcagtatcaacagaagcaggtcgttgcgctattttttttccgtatcccttctcggctaactttccagtgctttgatctataggtgcaatataaatcccgccaaaaaatgatccgtagatcagccaatggtgtcccatacgatctagagcaagatttgcgtcaatggcattatgatcggcgatgcctcgatgcgttttcacaacttctccttgatctacccaaggtcccaaaggatgcggtgctgttccaagaccaataaatgaagtggtactgccaaatgtagaagcggaatagtacattcgatattccccttggtactctatcacttcaggtgcccacaacccttctgcttgactccattctcttgcagattgtggcaattgaggaaaggcctgcttttcaaactgccagtgtatgagatccaatgatgtccggatcggtattcctgccgttttaggttgttgcgtatctgttgaaaataagtaataaacgctgtctcgttcaatgatcgttggatcatgaacaccatttttccagttcatagattcttcctctcagtaatcgattcactttagtttgacttcagtgaacgaaagcagaatcgattcttttctatatttatttagttctttcttacttattacgccactttcattaaaaacaatctatctgctcttgatctttgctacctccaagattaccccaggctagagtttctataactgcttatggcgtaacaaacaggacagtcattgaatgctctgccctgtttgtgcccacattcctgcaggacagtatttttttgataggtttgcccgaaatttataaaagcagccacacttagtacaggtgtgattggaccgaaatgggcaggcttcacaaatttttatacgggactgaacgacttcaagtgcagcaaggtcgttctcgatggctagctgttcttcaatcaacgcttctacatctaccgttgctgctgtttccttgacatcgcaacctttacacgtcattgaattacaccgccaaagatattgtcaatacactcatagcgggtatattgatcgttaattggctattatttgttgtgtagtcttcaaatgattggatcactacgtcttccggatgatcaaaatcattgtgtgcattcattttatcccccacaatatagcgagcttctttgattccttgaatggcagtttcaaagtcaaaactaattgcttccgagccagatactgcgaaattgcagatcgacaggtggagggtatctgcttgtttcgagaccgtgtaggtgatcgtttcacttgctgctccatgactctcgatgcgttcggcatcttgatggactttgtacaaatcaaatacatgatagcttggtgttttgaccatcttttcgccatcagtcaaaatcattgcctgcaaaacattcactgtctgggcaatgtttgccatgtgcactcgttctgcatgcttatgaaaaatgtttaaggtgatagcagctaccattgcatcacgaatcgtgttttgctgatataagaatcctggattcgttccgggttcagcagaaaaccaagttccccactcatcaacaatgatgcccacccgtttttcaggatcatattgatccatgatcgcactgtgacgcgtaatcaattcatccatatgcgcagctttttgacaggtaataatccattctgcttcatcgaatgctaacgcactaccttttttctcccacccttggggatggacataataatgtaagctcaatccatccatcagccaatgggcattcttcatcaacgtttctgtccagtggtagtcatcaacatttgctccgccagccactttgtatattttttgatcaccgtattgacgaacgtaagtctgataccgacgataaagatcagcataatattctggacgcatatttccaccgcagccccaattttcatttcctacaccgaaaaatttcatgctccaagcttcttcatgaccattttctcgacgccaatctgccattggagaaattccgttcatggtaatgtactcgacccattcagacatttcttggactgtcccactgccgacatttccattgacatatgcttcacattccagttgtttgaccaattcaaagaattcatgtgtcccaaaatgattattttcagtcacacccccccagtgagtattgacgatcgtttttcgattttcttttggtccaataccgtctttccaatggtattcatcggcaaaacagccacctggccagcgtaaaactggaatcttgatattcttcaaagcttccacaacatccgtacgcatcccattcttgtttggaataggagaatcttctcctacgtataatccttcatagatacaacggccgagatgttctgaaaagtgtccgtaaatatatttgctgatcgttgttcctgattttgtatttagaattttgattgtcattgttatactcctattctttgattccccaaatggactcattattatcgccaatcgttgagaacgttaatttttgctgttcgaattctgttatatcctgagttaataaggtccctttgaaggtagtatctgcgaaggtcattgtgatgtgtccggcatcgtatgtccaagtcccggtcagctctccagtgatgtttccatctttttgaagctcgatcatttgtgtttttagcatggtcgttccattatcggtgccatggttaatgatttcatagcgtccgataatttcatctgctgtcaaagcatctgctacttgttcattgcctcgatactcatagggtgctggaactggccagccctcctcattcatatacattctgttgactcgcacttcatgggcttcggttccattgttaaagcgcgtatgatacaccaaggaccactgaccattctcatcgatgatcgccgaattgtgtcctgccgctcgataccccatttgttgaaacgagaattggtagttgccaatcaatttgataccatagtttgaattttgctctccttgttccaaaattggactatttccttgagcatcgaggtaaggtccttcaggtttttccgcgcgaaagagtcgcatattgtaaccaccttttgctgctaaaccaccgtaagtgacgaataagtaataataatcggttttctcatcataaacaatataaggaccttctcctgattggtgatagccgccaaaaagcttgattccgaaataacgatcaatgatacgaccgtcttccgtcgtgctatctttcccaggatacattggttttccagtggctggatcaacttctaataagaagataccgccagaccaagaaccataggtcatccatagttttccctcttcatcataaaacaaagctggatcaatggcgtttggcgcataatcggtgttatatgtcagaccatcttcgatcgcccagttttcgctgaaaccgctgatttttctctctttgatcaatttcgccaaacgggtattttgatagttagtattgcgctcactaccatctgtcgaatctttttctgtaaagccagaatagattacagtatccgcataactatagggaccttcaatcgttttagctacagctaatccaatcgctgaacggcgccaagtagaacttgcggaatagtacaacatataggcccctttatcaccatttgaccattcataatcagcattccaaatgacatctggtgcccaaaggctgtaaccaccttgtgaattggcatcatcgtagcctgcccattcaaaagtttcagctagattttcttttgtgttaccatagatcgtattgtcttccattgattcatattcgtaagtgaaaggtacttcccaagtttgtaaatctgcggttttcgcctgagcgagatgcgaaccaaatacgtaaaacagctcttggtcaccaacatgaatagaagtaatcgatgggtcatgaatcgacactcgattttttgtcgttgtttcccactccttttgtgaaagttgctcagcggcgtctcctgtttgacagccagcaagaaaaaaactagtaaaaaaaacggacatggttaaacagagcatttttctttttgtattcatttttttcctctcttttatcctttgactgcaccgggttcaccaaaatctggtagtccatttttatcccaagtaaacggttggacatacgcatgtcgattgggattttctaaaggattactataatcatttatttctggtcttgcatgatacactaagatctcttgtttcccttcctcatcgactgtaaaggagttatgtcctggtccgtagagggaattttgttccgaactcgaaaaaaccggttccttcaacttatgccaagaatatccattcaatagatcactatcctcatctgcccacaacagtcccatcacatagttttcatccgtcgcacttgctgaataagtaatgatcacttttccattcctaatcaaggcagcaggtgcttcgtttactttgaagccgattttttcccattcataataaggaatactcagaagaatctgctttcctttcaaagtccaaggattttccatctctgataagtaaagattagaattgcctggaatatttggatccgcttgtgcccagacataatacaatcggttcctgtgttcaaataccgtagcatctaagctgaaactttcaaattgcgtcttgatctgccctttttctacccactcaccttcaaagggatcttcattcgcattttcgatcgcaaacatccgatgatgatgctgatcatttctaacttctccatgatctgcagcagcaaaatagatgtaccattttccctgaataaaatggatctctggcgcccaaatcagctcactcatggggccttcggcatgagccgtccagatgacttttacttcaccgtcagccagtccttttaaggttttcgcacgtcttaattcgatttcctgatatcctggttttgatccagtgaaataataatatccatcggtatgcttgtatatccatggatctgctcgttctaatacaattggttccaaataattttctgccataaattctacaccttcttaaaaatatccatcttcagtttttaacgttcttaaggctttattttttgatatatacaaaatagttgcgagtaaatagaatacaataccgatgacatcatagatgactaaatgaatgatgacacaggcaatcatccatctcatagttcctttattgatttgtttatctctcatatttttagcgttgatccaactgatcacacccattaagatagtcgctaaagcaacgatcatgactacttttgagatcatacctacaaggcttgattgcaaatattcatactgatttttattttgaaaagcagcgatgccttgttcttcaaaccaaggataatagccaaacatcgtaactaacccaatcaacacatcccagacagcactgacccgtaataaatttctttctatttttctgttcataagtttcactatccctttattcccgcatttaagttcatagattcaatgaaatatttttgggcaaataaaaacagcagtactgttggaataatggcgatcaatgctgatcccattaactgtccaatcattcgataattgccataaatgtcttgtagtaatagcaaaccggctgtgatcggcattttactgacatccgtatacacgatcaccggccataagaaatcattccaagaaccagtgaaagaaaagagtccagcaacgatcagaacaggtttgatcaacggaacgatgatctcagaaaaaatcgtaaattcatctgcaccatccattcttgccgactcgtcaaattccagcgggatgcctttcataaactgtcgcacaagaaaaatattccccatccctgctaatcccggaatgatcatagcaagtgatgaattgacccaaccaaatgtttcgataattttgtaggaaggaatcaaattaactactccagggaacatagaaatccccattagaatataaaagatacggtctcggtatttgaaacgcattctgccatagccataagctgttacagaaacaacaattaccactaagatagtatgagtaacggcaataaaaagagaattccacagccattgcatgattggtgcagtagaagtattagccaagattgctacataattatctaaaatccagttaactggcaatagtcgaaatccagtagacacgatttcagtttgggaacgaaaagaagttgcaaaactaaaaatcaatggaattacccagataatacataaagtgattaaaaataaatatgcgactagcatactaggtatatgtttcttttgtgtattcatctttttgcccccttaagtattgtttttatctaatagaaaatattgaaatacagatacacacataataattagtcctaatatgacagccattgctgaagccatccctgcaattgattccccttgactaaatgctaatgaacgaatgtacatcattaatacagtagtacttcgatttggtccaccgccagtcatcatcagcggttgcgcaaaaacattgaatgcaccggcagttgtcataacaattgtatatagaagaggaaaacgaatagatggcaatgttacattaaagaatttttgaactggtccggcaccatcgatttcagcagcctcatataaatcttcatttactcctgccagagccgagcgataaatgatcatattcccaccaatcgctccccatatactgacaacaaatatcaagatccaagcatatggctgtttagaagcccatgaaaaatcatatccaaaaatattatttacagcgcctaatctcgagtgaaaaattagtgaccatatcagagatcccgctgatactgaaataagacctggaatatatagaattgcttgaaaaagacctttcattttcacttttttatgttgtagagccgctgcaatcatcaaaggaataatgatctgtaagggaaccatgatcaaaacgaaaataaaagtatttttcaaaccattccaaaattgagtgtaaaacgtggaagaactatcaaataataatgtcttatagttgtttagacctatccaaacaggatcagaaatcaaattccactgagtaaatgaagcataaacaccatagagcgttggaatacatacaaaaataataaagagaaccatatgcggtccaataaatgcaattgaagcccaattaatgttcttttttttcattcctttcattcccttcaaaaaatccgaaaggggataattttatcccctttaatttatttcgccacttccgcaattttgtcttctacatactgctgcatcgtagctaaaccttcatctaaatctagttcaccataagcaatatctgtacaatagacatctagtgcttctaaaacataagagaaataaacatagtcaaagatatatagtgtgtcttcttcttctggtgttgatgtaaagaaagattgtggatattttttataatcatcgctttctaaaacatctttactggcaacgatttgtccagctttagcccattcaatcgagttagtacgaacaaactccaagaattttgcgataacttcctttttttcttctgttctagactcactcttcagcatgccaaacatatgagaagctgctcggttggttgcgatgtcatctgaagtcgaataaatatttgttacaccccaatttagcccatcaacggcatcgtgagcggtggaagtccaagtaccatctgttgataagagtacgtttccgccttggaacatcaaatagccatcttctccataaggagtcattaaacctgcatctgttaacgcttttattttttccaatgcttctttcatttccggcgtattcaccgtcgggttcccagcatcgtcagaaatcgcgccgcctaagttacggatttgtgctaagataacccaagaaagcaaagcattattaacaacataatcgccttcatccatttttcctgctaaagacatcatttcatcaaacgtcacgatgttgtcgtctaaccaagaagtgacattgtatttttctaaaagatcttgattgtaatacattgcactggcatggatatctaatgggatcgtatattgagtatcgccgatttttcctgcatcccaagcagtatctaaataattgctctcttctaactctggttgatacgaaatcaaaggctcaactgtatcaagaatgcctgaattaacaaactcctcaactttataagaatgcattagtgtcaaatcagggataccatttttagagctaacaactgtacttaattttgtatacatatccgaagtaatcacatgatttattttgtaatctgaatcagattgttcattaaattcatctacaatcttatccatataggcaccgtcatcaccagtgagtggggaccaaaaattgattgtatatttttctttttctaaagcgcggtacctgttaaacccaacgagagcaactgcaactactgcaaccaatgcgccaataataataagtttctttttcatgatttaccctctttcattgaaattgaattgtaatctttgaagccaatagccctatcctcctcgtcaacactagttaaacaatcatgtataatttaattacttatattcagcgtttgcaaacactttcaatttacaactaaataataactttatttgtaatcgctgtcaacaatattttaattaaacaactctaaataatatatcaattaattaatatatatattaatagtaactactataaataatactatttacacaaattaacaaatatgttaacattcaagtaaatcatttataactataatgggggtgaaatgatgcaattagaaatcaatcaagaagcattgcccgtctatgaggcgttagctagtaatgtacggatcaaaatcattcaactacttgcaagaaacaaaatgaatgtgaaagaaatcgcacaagaattaggattaagcagtgctatcgtcacgatgcatatcaaaaagctagaagaagcaaaaattatcaagacagaacgtgtcggtcagcgaaagatatctagtctgagagtcgatcatatcgatatcaattttccagaaaaaatctttaatgcattcgatacgagagaaacgtcaattccaattggtcattatacaaattattcggttgaacccacttgtggattagccacgcttgctggttttatcggtccagtagatgaacctaaattttttatggaccccaatcgaatggatgctcgcatcctctggtttacgaaagggtttgttgagtaccagtcacctaattttctttctctagatgagaaactagagatgatggagatttccatggagatttcttctgaattccctttttctaataataattggccgtctgacattacctttagcttaaatggcatcgagcttggaacttggacaagtcccggtgacttcgccgatattcgcggcaagtatacgccagattggtatcctgataacttaaatcaatatgggttattgaagacgattcgaatcatggatcatgggacttatatggaaggagaacctttatcagacgtcacgatcaaggatattcctgcttatgaagatacttggcatttaagagtcgaggtaaaagaagaggctgaaaatatgggcggttgtacattgtttggcaaagggtttggaaattacgatcaagacatcaaaatcaaaatgttttacagctaaacgtttttaggaatcacaggcacactctctcatcatttttgatgtgcggtaaaagattccttcgctgaaaataagacaaaaaagaccatctcgctcgatattagagttagatagtcttttttgattataaaacttaatctatttcttcaaatgataactgtaagttcctacgacaatgttttcacgccatgataaacggaatcttagacgcagacttgtttggttgtgtaaaatattttgccagcgacgacgtggcacgaactgtggaatgataactgtcgtcgtataattgtgtttcgttgcgtttttgctgactagatctacataacgaatgattggattttcaattgaacgataagaagaatgcactacagaaaaacggacatccgggaaattttgtttgaactcttgttcgatttctttttccttcttgacatcttcatctaaagatacgtgcattgcaactacataatctccgatggattgtgcataattcaaagccccgatatttacacgggtcacatttcctactaatacaataacggtattgccatcatatttgtggagtgccacttctttttccaaacgtagctgctcagcgactttcttataatgatcatggatcttataaaagacaaacagtaggattggcatgatgataaagaatggccagatgtcacctagacgaaaaacaaacaagatcgcaatgatcgcaaaagaaatcaacgctccgacgatgttggccaatgatttcaagaaccatcctttaccagctttcttccatcgaactaccattcctgtttgtgagagcgcaaagggaatgaacacgccaatcgaataaagtggaatcaaccgttccgtcgatccttggaaaatgaacaatagaacgatcgaacctgctgccagcgtaatgatcccattagaataacccaagcggtctccccgatcttgatacatatgaggcatatacttatctttcgctaagttataggctaacactgggaatgcggagaatccagtattcgctgcaactgctaaaatcaaagccgttgcgaactgcagaacgtaatacatgaatccgtgaccgaagatcgcagctccgatttgcgaaaggaccgttacttctgcttctggaacgattccataccaatagttgatgaatgtaatccccacaaagaagaaacctaggatcgcagccatgatcgtcaatgttgcagctgcattttttgctcgcggctttttgaaaaacggcacagcattactgattgcttctacccctgtcaatgaagaagaaccagaagaaaaagcgcgtaagatcaatgcgacagaaacccctggcacaacagcacctggtaaggctgtggcatttaatggctgtaccccagtgataatattaaataatcctacaagaatcaagatcgtgatcacagcgataaaggtgtatacaggaaccatcaagaaactcgcagattctcgtagcccccgtaagttcatcatcatgatcagtaaaacaatagtgatcgagatacccacctgatgcccatatagagcgggtacggcagaagtaatcgcttctgccccagccgataccgaaacggcaacagtcagcatgtagtcgatcaataaagagccgccagcaatcaaacctgcattcttgcccaaattctcactactaacgacatacgccccaccaccatgagggtacgcatgaatgatttgacgataggataaggtcaatgaaatcaacaagataataacgaatgcggcgatcggtagtgaataccagatagcagcagctgacaaagcaactaagacaacaacgatttgttcggtcccataagcaatcgatgacaatgcatccgaagataacaaagccaacgcggctttccttgtcaatttttgttcatcattctccgcggatttcaatggacgtccgaccaacaaacgtttcaaatattccactttcttacactccttttttcatgaaaaagatcataattgcacatacaaaatttctttgataattactgaattaacaagactgtatgctactcctgaaaccgacaaaagtcaatgaaaatggcatgaaaaatttgaacaaactccctcttctttttatcagaattcgcaagaagattcaagaaaagcagatagaacatcgtgccctatctgctcttgattttttaatggaaaaaatgactctttttcgagacattatttagtttcttagttacatctgttagataaggataagcccatgttcctatgatgccaaatacaataaacaacagtgacaaaataatcaactgaggaatggcgtttggccaatagatcccgccggctgattcccttaacagattgactgcatgggtgaatggtaacagcggattaataaattggaaaaatttaccagagacttggatcggataatttccgcccccaccagaaatcgatagaacaaggataatgatcgcgatccctttcccgacattgccaaacagtccggctaagacgtagacgatcatcataaatgctagtccaacgagtaatgcgaacaagacgctgtataccggattatgaacatctactcctaataagaacatatttcctagtgtaacgatcaagctttgcgcaatggccatagttaggaaagtcagcattcgagcaacgaatgtttctcgttgcgtaaagcgttctttatctttcttctctaaatgatactctgttgtagccacacttgacaacaataacgccccgacccataaacacaacgctgtatagaatggagtgctggcagaaccattgttggcaatcggatagatgtcatttgtttgcaattcaactggttgtttgaagaaatccgcttctttagttgcatcaagcttcaacaacttgatgatctcgcctagatcaacttcactttcacctttgcgaatcgcattggctgccttatgaatgcctgttttgatatttggccaatcattattgatcaaatcaactgccgcattcaatgctttttctacatctggcagtttctcatcaaccatgttcatggtcgaagtgatttcagctttgatggttggccagtcattttgtaagaaaccagccgcaatccctaacttatcttcaacgattggcagttcattgttgtaaagatcggcccctttgttgatggctgcgacgatctcatccatgtgaccattgagcatcgtattggcatcatgcaactcttgcttaatagcaggtaattctttttgatacttttctaagatactgatagcattgctgaccacatttttggttgatgccaataaagacttgaagtcaatggcttgcgcttttttcaatacatcttgagctgtggtgatggtggtgatcaatttagtcaacacattgtcgatggtatcggtaatattcgtcacattaatgccttttaaaagatccgtaacattttgtgcagcagtgttgacttcagttaaatagtcggtaatagcctctgtattcccatttttgaccaattcgcttaaatgatctagccgcgaagaaagatcccccaagagactttttgcattcgtcaattgattaatgatccctgataaatcggatgtgttgcctgagttttgaagattcgttaagaaagtaatcaagccatccagcgctgcttgttgccgttgaatattttgttggaaatcactgatgaccttttggatgttttcccgttcttggtcggtcaattgattgtcagcaattgcttgtttgattgtattcgttaagctaactgtcgtggtagcgacttgactgatggaatcaatcgttacttgaacactattagaaatacttggtagcgcatcttgtaactgttgggcaccttctttcgtcgctgaggcaaagtctgttgcttggtcccctaattgttggatttctggcaatgcggtttgtacttgatcaatgatttgcagtccttgtttagctgtatcaataccatctgtcattgtactagcaatagaatcaaaatcatcatcgatcatttttaattgcttgccggcattttggatctcagggatctttttctgcaatgtcagaatgacactagcttgtttttttaattctggcagcttgtcattcaatgcgatcagtttatcccccatttcatcgacctgaggaatataatccgtaaattcttcggctttggcgattttgtctttgatttccgggaacttgtcatgcaaatcaacaatttgcttcgtgtaactatcaatggtgtcaagattgccatcggtctctaaaatcatatttttgactttattgatactaactagatttgaatcaatatcatacccgatttcgttgaacactttgactaatgtagaactagcagtttcaataaagttctttgagatctgttcttggagactgcttgctcccttgtcagtaatcttaggtgcgatagcattgattttttggttactgtagtattcaattttcggtttaacgatcgtaccgctggtaaaactgaccagatcttttgaaaaatcagcaggcaagtaaattcccgcgtaatatttacctgatttgaccccttccactaattcttttttagaatctagaaaatgccaacctaactgtttattttcatgtaaagagtcgatcacttcattcccaatcgatagctctttcccttggaattctgcgcctttatccgcgctgtaaaccgcaatgggcagttcactagtgtttccatatggatcccataatgctttgatattgaaccacgcataaagcgagggcaaaatcatcaaagcaatgatcaaaaaagcggaaatcggattactaaaaattcgtttccagtctaatttgtataaataaaacacgtttttgattttgttcattttctttcccccacttttcttcgtcgaaggataatttaccacgttttttgtacgccgccaatgggaatgattcccttgatatcagccttttgacaaaaagtaccatttgtcaaaatgaaacccctttacttttcgcgtaatttcccttattattaatcttttctttaactttaacacgactgcttttggcagacgaacaatttgtttgctaaaagcaatcataaaaaaagcaccattgaccgtttcccttgatacgatcaatggtgcctgttctagtttgtcaactgctcagtggccaatagttgataaacgtactcaagagaagtcgtttcggcataaaggttcaaacctgctttttcatcagctgaaaaatgatgagtgaaactttgatccggtatcaacaccacttgaattcctgcccgagttgccgcggtagctcctggcaatgagtcttccataactaaagctgattcagaggttcgtgctgcttttttcaatgtcagcaaatagggagccggatctggtttgtgtgctgggacatcgtcaccaaatgtcttgaaatcaaatgcattctgcaattcaaaatgatccagtagtttttcacctcgaaaagccatcgaagaagtggctaatgctgtctttaaccctttttctcgtgccagagccaatgtctcacgagcaaatggttttggctgcaagtttccattgagcaattggtcttcaatgtacccttctcgttcttgccgaagttcctccacacgttgaagaccaccaacttttttcgctagtaaggttgctgtctgttgccaactttgcccacgccaagcaacgatatctgctgatgtgatcggtagatggtacttttcaaaaagtgccaaccagccttcatgatagactctttccgtatctagcagcaatccgtccaaatcaaaaatcaataattctttcatagactctttactccttctctccttcatactcaagcagtttcaatataagtattttaatcaagacatttgacgattcttttcggcagctgcatgaacagccttcatcaccgcagcacgaaagccattttcttccagtgtttttacggcttgaatggtcgtaccaccaggagaactgacattgtctttcaatacaccaggatgttctttggtctccagcaccatcttcgcagcgcctaaaactgcctgagcagcaaattcataggccatttggcgggtcattccttcggcgactgcgccatcggccaatgcttcaatgaacagataggtatatgctggggaagaaccgctgaccccaatcacagcatcgatcatggattcaggcacttgagctgcttttcccatgctttcaaataatttttggatttctgcagcttcctctacggtcacatgcggattgttactgatagacgtcatcccttctccgactagtgccggagtattcggcatcactcgaacgatcttgcgctgacccaaaacttcttccatctgcgcaatcgtaacgcctgctgcgatcgatacaactaactgttgttcatttaattgcgcttttagatcctccaataatttaggaaacacaaacggtttgacagctaaaatcaaaatggaagcagctgcggcttcagaaagttctaatgtaggggtgatccctaaatcttgttccaactgtttaagtgtcggttcataccgatgattgtagactaaaatttcctttggttgatatagttccgattggatcaatcctttgataattgcttttgccatatttccggccccgataaaggcgatggttttcataacactcactccttctaacatttatgatcctatgttcgctgtttcttgtaaaaaaagcctaatcaagagattaggcttcaaactcgatcacataaggatgcaatgctgtattatagatgccctctgtatattctaccacttctccatgcagatcataagagcgacggacgcgctttaaagcggaaatctctggtgtgatcagaaatttttgttgttcctcattcaacgtcagtcctgcaaatgaatcttcaaaggtatcgatcaccatccgatgttcatctaaaatacggtacagtgatttttcttccaattcttccatggcaaggccttttaacaatttgggcaaatgatattcataataaataaatggttgatggtcaaaatagtacatgcgccgcaaacgcatgacttctctgcccatcaaagcagaagctggatgatcttctgcgagctcgactaggttaaaatcaagatttttcttggtatattctttgccggttttttctaataactggctgaaagttgtccctttagacaacttgttataaggtcgattacttaaaaccgtggtcccgcgtccactgcgcttttcgacatattcatctgctgctaatagctcgattgctttgcgtaccgtgattttactcacattgaaggctgcttctaattcggtttctgtcggtagaaaagaaccaacaggatagtgtccggacatgatgtcttctttgattttatctgccacatcacgatataaaatatgtttacgcttcatttctttcctcgcctttccagtcattgattctctctcaaaaagaggacttgcacgttactcatcaaaacccggcacttcttcggctgctgcttcgatcagcaccttccgaggcttactgccttctgaaggacctacgaccccttggtcttccaattcgtcaacaagacgggctgcccgattgtagccaatccgaaagcggcgttgtaataaagagacacttgccgtctgcatttcgatcaccaatgctttggcatcatcaaatagttcatcctgtggttgaccactgctggtacttgccgtatcttcttcggtaaccatcattttctcttcgtaattcgctccctgctgctcggtaacaaacgacacgacccgttctacttcgtggtctgagataaaggctccttgcacccggattggtttattctcacccataggcaagtacaacatatcgcctcgtccaagaagtttttccgcgccgttgctgtcaatgattgtccgggaatcgaccccgctggaaacggcgaacgccattcttgaaggtacgttggctttgatgattcctgtgatgacatccacactaggacgttgtgtcgccaagatcatatggatccctgcagcccgcgccatttgagctagacgaatgatcgcatcttctacttcattacttgcgaccatcatcaagtcagccaattcatcaacaatgacaacgatgaatggcaagattggtcggttttcaccatcttctaaatttttattgatcactagttcattgtatcctgtgatatttctaactcctgtcgcagcgaacttctcataccgttcttccatctctttaaccactttttgcaacgcttgcgctgctttccgagggttcgtcactaccggagtcaatagatgaggaatgccattatagacattcaattcaaccattttcggatcgatcatcatcaatttgacttcgtggggttttgcccgcatcaaaatacttgtgatgataccgttgattgcaacggatttcccactaccagtagatcctgcaatcagtaagtgaggcattttcgttagatcggccgtttggacacggccagaaatatctctacccaaagggacttctaacaacttatcgggatgatccggctgtgcttcaatcacctctcggaaggaaaccatgctgacagcactgttaggcacctcgatcccaatcagtgattttccaggaatcggtgcttccatccgtacatctttagcagctagtgccagtgcgatgtcatctgttaagccaacgattttgctgactttgactccgactgctggctgtacttcaaatttagttactgctggtcctaaactagcttttaccaccttggcatcgacgccaaagctttggaaagtcttttctaaaacaccaatgttttgttcgatttttttgtactcgctgctttgatcggttgcagggatcgagtccaacaattcagcggacggcaactcatagtcgcgattttctgcttcttcggaaatttcaaattccaatacttcgccatcatcttccatttcttcaacgctttcttttttctcctgtgccgaagccggagaggatgatgcagctggcggtgttttgggcaattcttgaaaatgatcgattggcacaaaacttaactgctctggttcgatttccgacaaatctggttctgattgggctgctcgctcttcttccgtgaagggacggacttgattcttttctttgatctcagccaaaacagcagaacgctctgcttcttttttcgctgctttttcagcagctttttgcgcttttcgttcttcgcgggctgcttgtttttcaggtgatccttccaaccattgctgaaccttttcaccagcgtgctgcagatgctccaacaactcgtgactgctcatcttactgaacaaaaagcccccgatcatgatcatcaagacagctaaaatgtaactgccgatctgggatacaaggaaataggttccgcgatagaagaatgcgccgaccatgcctcctcccacattttgtgaaacttgactgcggcgaatatcatccagcaatgtcgaccaagtcgtctgcaagacattcggcgattcattcatgacattattgaataaatgcgcatgcaggatcactaagatccccaaatagatcagcacacagccaaccactcgacgtaaactcgtaaaacgagcttctgtggtcttgattgccaaccatcccccgtaaacggccaatgcgagacaaagcacttgatacgtattgcctccaatgatacgaaagccgttagcgatcagcgttcctaaaaagcctaagtggaaaaaaccaaagatcgaaaacaagatgaaaagcaagccgatgccgactagaatcagtttctcttgttgtttttgttgtttttttgttttgcgtttcttcgcgcgttttttttgcgccattcttatccctcttttcgtctctacctattataacgaaaaaagaaggcgaacaaaagttttcctgtcagaaagtttactactagaaataaaagatcccactaatgaaaaaaagaccgctccataaatccatcaaacaaagacgatctaaaggagaaaagacaagaaatgcttcttaaaaatctctttagtaagactacagttaagctaccttgcacctgttcatcaatcgcttcatgccaggtagctactgtgatcgtttttgttgtggcttatgtcgccgtcaatcgtttttcatttattcaggagaaacatcttctccaaaccatttttcggaaatctcagcaaatgtgccattttcttgcagtttctttaatccctcattgattttatccgccaatgcttgatcgtcttttcgtactcctactgcaaaattttcggctttgaagggactttcaataacattgtaatcgtccgcttttttcgtctgagtcaaatagtactccgcgtagacccgatcgatcaaaagaccatcgatccgaccattttccaaatcgataaacgcttcgttgaaactagcatataaagttgcttcattatcggcgacaatgtctttcaatacttctggttgattgttgaaggtatcatagccagaggatccttcttgtgcccctagaactttgtctttcattgcatcaaatgaagtgatgttgctgtctttggcagttactagaacctgcttgttttccatataagtatcgctgaataatactttcttttcccgggcttctgtttttgtgtagccattccaaatcatatcgattgtaccattatctaattctgtttctttcatcgaccagtcgattgcttggaatttgactttggttcctgttaaatcaaaaacggcttttgctaggtcaacatcgaaaccaacgatgtccccttggtcatcttgaaagcccatcggtacaaaggtatcgtccaacccaacgatgacttcctctttgtctgcagcactttctgctttctcgctactattgccacatgcagcaaaaagtaataagctggctccggctaacaacgttaatccaatttttttcatttttcttcctccttagttcccttcaacttctaataattgatcggcaatattttttgcaaaaaccagatcatgggtaaccacgatctgagtaacgccctcttttttcaaatctaagatcagtttttcgacttgctggcgcagacctggatctaatgcactcgtaggttcatcatacgccaatactttcggatccatcgccatcgcccgcgcaatcgctacccgttggcgttgccctcctgaaagttggtaaggatattgcgttaaaagttcagataatcccaactgtttagccaaagcaacagctttttcggtatagctagctttgtcttgtttcaataccatttttggtgccagtgtgatgttatcgaataccgacaaatgcggaaatagctgaaagtcttgaaaaacgacaccgactacttgttcttgttttttcgtatccgtgggatcaaaaggttgtccatctagtaaaaaagttcctgaatcgatggtctccaatccagccagggtacgcagcagggttgtttttccaccgccagaaggtccgactaccgctaggatgctgccttcttcaattgtcaggtctaagcgatcgataacctgcttgtcgccaaatgcttttgatacttgtctcagttctaacatgttcctacgcctcctaacggtaataatcgagttttgtttctaactgtttcaaaatcagtgtaaaaataccagtcatcattaagtaaatcagcgcaacgcccagtaatggtaccaacgtgctgtctcgttccattgcgattttaccgatacgcataacatccgacaaacctaaaatatagacaagcgaagtatcttttactaaattgatcacttcgttccctactgaaggaagcgtgatcttgactacttgcggaatgataatcttgcgaatcgtctgtaaaggtgctaggcgcagaacttttgctgcttcgtattgccctgcagggattgattggatccctccccgaaaaatctcggcataataagcggcataattgataataaaggcaatcagtgctgcttcaaaccgatcaaagacaatgttcaggatcggcagaccataaaacacaaagatcagttgtaacagtaaaggcgttcctcgcatcagccagacatacacttgcacgattgctttcaagatccgtagtcgactagcaagaataaaagccaagatgatccctaatggaatcgatcctattaacgttaatccaaacaatttgattgtgatccctgccccagaaagcagttgcggcatcacacttactaaataatcgatcatttctttttgcctccttgattttgcggcaatgactgcttgcttgatttacaatcaccaagcaccatcttgccgtgtttccacttgattaaaatcattaaaatgaaaggcgcccaacaaaaaacgccctccggcctaatgccagaggacgtttaatacgtggttccacctcaatttgtttttccttcacagaaaaaacctcatgcagtcagttgatggatttgctgataccgccattaaataaaaaaagtcctttagccattacagctaaaggacgttatcaacgcggttccacctttgtttatcagtgcttcacagcaactgatctcagaaagtcatcaaacaatgactgctgctataacgggcactcccggtctttcctactcgattcagaaaaacgactccaagatgtggttcacaagtccttgttgtctcttctcaccagccagagactctcttaaaacgaagaaaccttgctactcttcttttcgatgtctgtttcattaagttgtttattactttatacgcaaactgaaaaaaagtcaaatactttttttcagttttttgatcggaaaattcattttcacaaaataagagacgaatagaaacattctatccgccctaaatgcattttagacttcgtaatgatcagtacaactttgtattccctctatggtactttcagttgaacatgatagcgatagcggtccccacgataataaatttcagcatattcaactaagcgatttttgtggtctttagtcagacgctcgacatataaaagtggtgtattcatttcaatttttaataagttggagagttcttcatcagacacaactgactcaatggtttcttgtgctgttgttactataaaaccttgactacgcataatttgataaagtgatgcatgtttgtcagcaagatctttttcttttagctcaatgtatgatggacaatatactcgttgaaatccaatacattgatcatccacgtagcgaaggcgttcgtgtttgctgacctccgctccttttggcaaatctaacttactacacaacacctcatttgcttccaaagatgtatttaaagaaattaactctgaatgattggactgcagtttattttcttccgaaaaacttagaagggtttgtaattgcagtaattctttcgtactgagtacaattgtacctacaccatgaattcttttgataaaaccttcatctactaaaagttgcaaggcatgacgaactgtaatacggcttactccgtatttttcttgaagttccggttcagtcaaaaaaggttgcccaactggatattttccttcattgatttcttttttcagctcttcataaatcgagagatattttacctttggacttatcattttcattcaccacatttgctaaagattcagccaaactagttaaatcgtagctattcgctgattgaacatcacgaaacagtggcgtaaaacgttcatcatctggatcaatcaatgccccaaccatggatcctacaattgtcgcaatcgtatcagtgtcgtatcctacattcactgcatctatgatcgcattaaaaggatcttgtttgtttagggcgataattccaaacgcacacggaactgcttctgagatatggagcccactaccgatgatttgagctagtcgctgtagtttttcttcatgggtaccagattcattaactatagtatacgctagtttcatgcgttcaacaacgctgggaccgccaacttctcgggaataaactttgcctaattcttctccccgacaagcgccataaatccctattgctactaattggtccacagttgcatggtcacacaaagaggctgacactgctgccgcaactgcagctgctccagaaatagccagtgcattatcatgagttacttgcgttataatcaacgcttcttgaatagctttttcaatatctcctgggtttaatatccctgcaggtgcgattttcattgcagctccgttcgtagcttttgaagcatagtctacagccatagctcccggtaaaggcgccattttttgatcaggatttttatacattgcaatcgcacttcgcgtagttggacctgcaaatcgatcgaagtaccatgtattttctgaccatttcaagatggctgtcttcactgtttcagaatcaattactcctctattttctataatactgtgacacaacgtataaatttgcgaaaaatcatctgtgacttgtccagcttcattccctaatgcaaaagcaccttcctctggttttaaaaaggtagaaactttgccattgaactttgttctaatttgatcaaaagtaagattttctgttgcagctcccatagcatctgcaatagctgctgcccccaatgtaccttgaatttttatttgtaaactcatataaactatctccattctcttattctttatttcatttcagcttctgggtcttttatacctaaaatgattgttaggatcattccaccaaaaaatgcaatcaccaaacccacaatgtacgcccaaagtgtaggacccgcaaaagctggaatggtggttaatcctccaaatacaaaggcgttaccaataacattaaatgcacccataaaagctccacccattgcagcaccaagacagccagcaatcaacggtgttttaaattttactcctagaccgtaaatagcaggctctacaattccagataaaaagacagaagtaattgcagtcaaagaaaagttccttaatttggtattttttgatcgtaagaaaactgcaaatgctgctcctgccatcccaaagtttgcagttacgccatacgcaatgaatggtgagtgacctgtgctagcgatttccggaataataaccatggtatttggtgcccaatgaacaccaaacatgatcaaaatattccaaatgccacctgtaattgcccctgtaataatctgattgattcctgctaaataatttacaaatccagcaataccaatactaatatagttacctaagggaccaaaaatactggcagttacaggcactaacacaaacaaaagaacggttggtatcaaaatcatatgcaaactattcggaattgtttttttcatgaaatgttccattttcgattgtacccatgttgtaaaaattgcgggcagaatctgcgaagtgtagttaaagactggaactggtaaaccaaagaaagaaatcgtattgcccccgtccccttggatcaaattaataaagtctggcataatcaatgcaccagcgactgcaatggcaatataaggactcgttttaaatcggtttgctgcagttaccgaaactagtaacggtaagaagtagaagacagatgttgcagcaagtgtcaacatcaaatttgtcgagctatccgtagataaaattccgacctcatttgcaagaattgtaaatcctcgaagaagacccgatccggctaataaaggtaataaaggcgagaaaatactcactacgagttgaacaaactcatttattaagctcttttttgtctggactttagaatttttttcattggtcgtctcattattttctctattcaatacttttaagaagtcttcataaacttcccctacattcgttccaataattatttgatacccggaatctttattgactactcctgtcacaccatccaataattctattttttcactttgaactaactcacgtttcttcagacttgggcgtaatcttgttgcacagtgagtaattgactcaatattttctgttccgcctagatactctagaatctgctgggctaacctttcatttttcatgataaatcccctttctataatgaattagcaagtcgttatgacgtcatatcaacatctaaaatatacccctaacgcccttgagtgtaaacgattacaaaagaaatatatccaaagatttatttatcactcataaatctgctttcaagatttagcttttttgaacacgttctattgaaactattttttaacactttagttaaaaagaggatagaaagaaactccctgtgatctctgttctaagacgtcttattctaatcatattataatctgttttaatcaaagtaaacattaactataaaactttgaactgtaagaagatgtataaagtccaccaaagtagtttcatttagaaaaatttatcaagtatatctattattcaactatctcatttctaattttattataaattaatgagtttgtatcagacacccaaggaagactctctcgtcaaatctaaaaataaaaggatgaatttgaaaatttattgagttaccctttattagatgatacactttttaaaaaggagttttagcaatgaaaaaaatctgttggattttttctatcaatgttcggggtatggcaccattcggttacagcacaacaatgaatcttagacaagcaaaatcatttcaagaaaaaatcaagacactcttaccagcagaaattgagactcaatttattagttatgatatttcaagtaatgatattcctgctgcagatttacttgtttttaatgatatggattcaaactatctaagcgaagaaataaaaaaacaaggcattgctgtttcttttaaagatatggtttccggaaatactacagttatcagaaaaacaattctgaacgccctaaatttaggcggaatttgaacagtttttctgcttgtaacaataacgacacccctctcatacttatgaatatgagaagaggtgtcgttatgtattatttatctttcgtcctatctaaaataaagcaagtaataattgatctaagcgcctagataggtctctactaataagaacactgattatttgatatcttatcaatattcataacggggagaatgaagagcataaaactagatagctttttctttattcgttagttatcgttctatctgcttttaatccaaacgtaacactttcaaaaaattacatttattgtttttcgaactatattgtatgcatttcttcaatatcaagtaatgacgtacgattatgttgttctatttctgatgctcccccctataacagatgttactgcacttaaatctagtatagcaactgaaggtttaacaccaatcctaaattttttccataactcttctttgattgtatggtaagcctaccatgatgctccacaatcaaaaaaatagtatctttttgcactatatatgtatcaaatcactatgttatagtttacttaaggagggagaaaatgaaaaagatagtactaaaaaataaaaaactgcttgttacgcatgtgattatttgcgcaatcgctgcgcttattcaggttggcgttgcacttgtttatagccttatcacagaagttgctatgtcaggaaatatacaaaagcttatggttgttggcttattcgccttcttttatatcttattaaacaccatgagcgactttgtccccagacgcagtaaatctatcttggtccactcaataacggatcagctgagagtcggcctctcgcaaaagatagtccgaatggatccagaaaagtttttaaaaagcgaaaaaaattattacctttcaaagctagccaatgaaataaaagttattgagcaagaatttttgaaacctggatttggattggttttaagcatctttacctttattttttcacttcttttctctttaagacttagtgcttccttttcaattgtcatgctattgctagcctttagccccttgttagctccttattttgccaaaaaaattcttggaactcgtcgtaaagcggcggtcgaggcacaagatcatacactcagtttatttgaacaacttctttctggctatctgacactaagagtaggcagaggattcccgaaatatgctacacgtttttctgaaagtagcgagcgactgaaaaagcaaaatattcattttgaatcgttacaaggacttacctacgcgatttcttttggtcttggcgaccttgcctactctggaacgtggattattggtggtttttttgttgcagcaaaaataataacccttcctaacctcattgctatgactaccttaatgagtacgattgccggtccattggaatatttcagcacctcgattaccgatattttatccagtaagaaagtcgctgatgatcttatatcttttatcgatagtacagatgatgatgaaatgactcgatcaatcattcttgaaagtcccatcacaactttgtcgattgctaacttaagctatagttatggtacccgtacattaatcaatgaattaagctatcaatttgaaagagggaaaaagtatgcaattacaggtgcgagtggcagcggtaaatccacgctattgaatattttagcaggcatttattctgtcggtgaccgtcaactatttatcaatgaacaagagatgaatcaaatttctagagattccttgtatcaaaaagtctcacttgtccaacaaaagaccgctatttttcagaccagtattgcttctaatctctctgtttttaatgattttgaacttgaaagagttgttgatgcattaaataagagtggcttggccaatcgctttaactacgagaaattattagaagaccaagaaaacaaatggataaattttctttcaggaggggaattaaggagaatcgaaatcgctcgcgctgtctttaaaaattccgatatcattctattggatgaaccgacttctgggcttgatagtggaaatgagctgattatcaaagatttgatcaactctttcaatgataagataattatcgtagttactcattcaactagtcctgattttctagactcttttgacgagctgattcacttagatgctttacccctcaaaaaacaaaacaatccctttattcgcttgtctttatgatttcctccttgaacttgttagaaaaagaactgaacctagtaaaatgttctttgtcatactactaatgacaaagaacgtttgagggttattgtttgaggctcattgacttcctactaaaataaaatttcatcagattaaaaaattcttcttactctatgttaacaaaatattctgctattaaattagttatagagcgcgacactttacaatcaccgttactctaagcctttctttagttctcgcattcgctgcatccatcctacgtcttctacagtaactattacttaataacaaaagaacgatacttggaataggctatttgatcgataatagtaaaaattttctttatctctaaatctgcgccgattgccgttacttgatagaactgactgtaactgttccctaatgcgggaaggtaggcattagagatcaataaatcaaatggttcatcacttgtatagggtaggagaacaacgtcttgtttccctttcaactcattttctaataagtaaatagaggcatctgccaaaatactagagcccatatttaagaccgctattctcacttgatactcctctttaggagacagcatgtaaattaagaacactaatctttttttcaaatactttaatttcgtgtggttgaacaatttagtcggttcaataatattttctattatgtctaagacaaactgatttctaaacgaattgttaaacaagttatggtaataattcaaagtgactttatcgatcgaataattgaccccatgaaaataataaacttgggcgatgagagaaaagacactggatttaatggttgaatttgactttagtttataaatcgactggatcgcggccattatttcatcggttatctcaaagacgggatttttgctagtatataatcctagtcgaatttcctcataggggatcccaccaactgtaattaaaaataagcagataaaataggtgacgattgtcgcttcatctgatgaacaaatatatttttttgaaaaataactatgccgaatgtatttaaaaactggcatatctagacagcgattgatctttatttgctcatcttggcctacttcgctgtcttttgactctggcgttaaaccagtgacttcttcaacagttggcttatctgcagtgtagtgctcaatttctggactagtcaccgcatcaaaggttgtgtcatcgtctttggcttgccactcaccatacgttgtttcctctgtggcttcattggtggtgactgttcgggtgaaagtgactgtatccaccttgtctggggcggcttctgtaccgtcttcatacagataatggatcgtttgttgcacttctttggtctcggttgattccaccatgtttgccttgtaagtaaccgttacttcgctgtctttcgattctgctgtcaagtcaaccatttctgccacaccttttttatctggcgtgtagttggctatttctggactgaccaccgcatcaaaagtggtgtcattgtctttggcttcccaatcaccataggaggtttcaccggttgcttcattaatggtgactgttcgtataaattctattgtatccacatgatccggcgcggcttctgatccgtcttcatacaaataatggattatccgtgcgattattttactttcctctctcgtttctattttagggctgtaaacatacgtgactgtttggggatttttgctaacgattcctgtctcatcaccttgcacttctttcaagatatatccagggatatctttcggagtaatcgtatatgaatcgcctatattgccaccagtcattatacttggaggaagtaattctttcccctcttcatcgatataattcactgtgattggtgccccttcaatataccttggctgccatacataggtatcagccatagtcgctccatcataattcaataccagttccttagacaggaatacctgatcaccataaggagcgtctatcgtacctgatccaacattttgccaataaccggtataatagcttgaactaaatccaatcattccacttggatttgtcaaattaactggatactcattacctggccaattgttccagccgacaaagctgaatttttcccctagtcgtatttcttttagatatcgtgcatttgctagaaattgattcattccagcccctaaggctttgattacattggtactatcaaaatttgataaatctaaactagtccctctaaagccataaaacatgctgttcattgttgtggcttgacttgtatcaagcaaatgtagattcacgatttcatccaactctgaaggcacttttccataatggccagtgctttcaaatagtccaggaacatctgctggaagaacaacaggggcagtgagaactacttttctaatagtcatgtttgatgaaacttctgctattggaatcacttgatctaccgttgtagtaagcgtgccttctcctacagttagaactccctcaatatcaagggttgctggagcagtcccccacattccactccaaaggatattgtctgcaagagcagccttcttttcttcagttgctgctgtactgtctgtcgacgcttctgaactatttttctctgcatcttcttcagattccgttttagttgctgcaaattcttctgctgtcgcttgctcttcagattctattgcttctgactctgttcctacagtttcctcgactactttttctacttcttgctgttcaggcaacaactcccccgcagtaagcattgtttcttctgctgctgtagtgctaatttgatgcagctgatgcaggaatactaaaaagtgcttgtgtaaaaatcgggctgcctaatataaatacagaggaactgacaagaatacgtgatacgatttcttgcttcttcgatcttctcattatttttccttctttctatctaagtgaatgaacacagtctcgttctatccaatgcaaaaaagctgtcaactgacaactacttcagacatattttaatactcctgttgtcctcattccttaagtatgtattatcacatggctctgagtagcgaacacgacaacatctgctctaaaaaagacaagattcgtcctgtttaaaaaaaataattaaaatcctttggaaattatgacaaaaaagaaaataatcacattcatatcagtatttcaacggattatgcgaaaagattttgaacatggaagatctctttttattcctaatcattcacttagagaaaagacaaaaaaaccgcaatacaagcgtttgagcaaatcaactgtctcaacgataaaaggacttgcccacttgcgcagcattgcatcaaaaatatcgtttagagttgttttcactgtcacttatattgcagtcataaaaatggataagcagtcatacttgcagccacgtgttttgggtctgctaagtattcgcttgttgatcttgaacatttgatttagtcaagttcacaccttagctgttgatactgccaattcgaaaaagatcgtcactagcagatacggatatctaacgttatctgtaatgattctatagtgaggtatttgtccctgtttcttgaatagactcattaatagactcattttggaacttttcgatcgcctcgactaattcaagccagcgatctccggtggggaaactattccatttaaagaaacgtacttcgcgattttgattaataaagtattgacgatcgacaggataatccatcacgacaaaatccggcttttctgatacaaaagaaagagtatatccaaaccatcgttttaatcgctctttttgcctaatttcctgaatttttccaaattttgattcatgaaaaacccgcacagttgaccgatcaattctagctacaatcgaaagaagcatactgtactgaaaaagcaggtggttatttgagacatacagcgtactaaaaatcgatgattgttctgataacgattggtacatctcttgaaccagtggaaatagtttagggaatactcttcgataatctttgtctgttgttgtttttccaaaagcatcaatcttatttttagaagcaaacatgagagaggttgaatggatgttcaatgcattgacaaaaagatacgttgtagcactatcaggaacaagaaaagcttgtttcgctgtttccgaaaaaagtttagcggcttgtaagctctcttctgaaaaatgatttgtcatcgtcaactctgtagggatctcatcaggtaaataggtggtcattactgaaaacatataatacaagaagatatactcattttctgaagtttcatttaacaaataattatctcttaagaggggcattataagctcctttttgaattgctcaaaaggaatagtgagatggcatgtttctgtcattcccggtggaatttctttcaaagcaaatcctctctttaaacgatagagacttaaagccagtaattggataaacttttcttgatcgattcctcggtaacaacttggatacatcgcgagtctttctttgaaaccagtaatacttttttgagtcaggccaaaataacgtacatctgagccatcaaaaatttgccaatacatgatatgaaaaaaatgcctaatacgatattcttctcctacaaataacggcttcctctttaaattcaacgaaatattataattttcaaggatatccatgatctccttgagttttctttgaaccgtgcgattactcacaaaatgctgttgcgctgtattctccaaggataaatatttctctctgaataatcggtccaatatttgaaaaggcatgctttcttctaacatgacagaatataacttagaaagtaaaaaatttgaggcaaatcgaagtgaaatggttcttccgtcaattatttcgatatcataaaagggataccgttctctcaaatccagtgcacggtcaataactaaaacaattcttcttttcgaaacacttaatttatttgccaagtcgcttatactttcatattcctcagcattttcaaaaaaataagcaaatacttcatagacatcttgatctaatttagttaaaagaaacttatacatgccctcacctcttaacctcttactttaaataaattatacctcttctaccttctaatatcattgattgtgcattaatccataatgtttttgatttttttgataattatttaaatttctacttaaatagccagcctatttcattttgtctcataagtgtcccttctctttctcctcctattgatctgcataatcaacttccttcaatgctgcgttacaatccagtgtcttaatcagtaacttttcaatgattgaatatgaaaaaagatatattctataggattttcatctagaacattactgtatgatacaagtgccattttttaacataaaagtgatttttactaaagaaaaattgaatgactagatgatacagtcaaactagcaaacattcaaatacaaaacaaaaatgaagtgtccagaaagctgttatttcttaggtactttattgtttgaactgaaaattaggcttttatacaaaaaacatcaaagctaatgaatacactttgatgttcataaaacagttttaggataacttattaacgaattatctgagtatcctcgtatcatcagtaagaaattctctagatacattggttaaagttctattactcatttctttgataattgactaacggacccagacatgagatgcccaaggttcgcttttattttttcttccggccagtcccaccaacggaccttttgtaaatactgaatcgtttcatcattaaatctttttctgattggtttcgcaggaacgcctcctacaatggtatatggcggtacatctttcgtgactacagctctagtacctataatgacgccgtctccaatcgttacgcctgccaggatcagtgactcatacccgatccagacatcattgccaatcacaatatcgcctttattgtcccatgcagcagccacatcggctttatcaagaccccactcttcaaaaaatagcggaaatgtatacttggaacgcttgataatgagtggtttgcagcattaaacagaaactttgatccacaagcaatggaacaaaatttgccaataatcaatttgtcatgattgattgggtattgatacagcacattattcctttcaaactcgcgtggatcatttacaaaatcattataaatcgtgtattctccaacgctaatatttgggttagtgatggcattctttagatagatcgtttgtgtatcattggttcttgggtaaattttatttcgtgaagtagtcataatattcttctccttttggtgtgttaacgtttgactatttcacatactacaatgcactttttcatttttttacctcttctcaatttatgtacgtaatgaatatatctaaataatagtacttgaaatagtaagcagctgaagaaaaaaccgctactaacatggtatttcattcaactgctacgaatacgggacacttcaaaatcaatgtgcttaccacaatttaaatcaaataaattatagccattgtatactcataaaaaaacttacaccaacagttaaaataaaacaaggatatttaaataaaaaagacaggatcctttttattcatttgtgttctccagaaactatatacgattctttttttgaacgttacaaagaactaaccactaaaaactattgggcaaattgggcaaaaaatcagtcttttcatgactataacggaacaggcaaggagacaatatatagctcgactactaatagtactatgcatgcgaataacataagattttctcgacgatcatggtttggatgaagataggcttctgattttggtctatctttaatatcatcttgtctaacttttcttctaatcaatgccacttctgaaccgaccgcccaacacaaagtgaacagaataaacagcccaaacgatagataaatttgtttaccaatagcaagatacagtagaaaaaagtcaatcagcttaatcgaaaacaaagcgactcttcgcacctttcgtccataatagatccaactataactcatgcaccctcactccttcttaaattaatcactaccttttgctttcatattttgacttaatgaaagattttctcatcgattcttagtataatttcctcaatttgtatctcaaaaaacatgattataaataaatatatactaaaaaaataaagtgtccataaaaaatgatatccagacactttattcatgttcttactataaataatacacttaatttgataggttcttttttcgtttactgattctatacgataagagaattagtagggttcctaaaatcaccaacattgattgtcccaacgtttcttctcccgtagctggcaaagtccctctagaatcattctctttttcattatttttatgaagaacactatagacatacaccacttcctgcgcttcctcgctgaaaattccagaagcattatctggtatctctactacataccagcctgggatctctttggcttcactggcatatggtaacccgacttttccacttaagacagttggctctgctaattgatttccttcactatcttggtatttcacagtcactggtgccgcatcactgcgttcgtatacatacaccacttcctgcgcttcttcactgaaaattccagaagcattatctggtatctctactacataccagcctgggatctctttggcttcactggcatatggtaacccgacttttccattcaaaatcgttgggtcgcttaattcgttgccgtctgtatcttcatatcggaccgtaactggtgccgcatctgagcgatcatacacgtagaccacttcttgcgctgcctcactgaaaattccataggcattatctggcgtctctactacataccaaccaggaatctctttggcttcactggcatatggtaacccgacttttccacttaagatagttggctctgctaattgatttccttcactatcttggtatttcacagtcactggtgccgcatcactgcgttcgtatacatacaccacttcctgcgcttcttcactgaaaattccagaggcattggctggcgtctctactacataccaaccaggaatctctttggcttcactggcatatggtaacccgacttttccattcaaaatcgttgggtcgcttaattcgttgccgtctgtatcttcatatcggaccgtaactggtgccgcatctgagcgatcatacacgtagaccacttcttgcgctgcctcactgaaaattccatatgcattatctggcgtctctactacataccaaccaggaatctctttggcttcactggcatatggtaacccgacttttccacttaagacagttggctctgctaattgatttccttcactatcttggtatctcacagtcactggagcagcttcactgcgttcgtatacatacaccacttcctgcgcttcttcactgaaaattccagaggcattggctggcgtctctactacataccaaccaggaatctctttggcttcactggcatatggtaacccgactttgccattcaaaatcgttgggtcgcttaattcgttgccgtctgtatcttcatatcggaccgtaactggtgccgcatctgagcgatcatacacgtagaccacttcttgcgctgcctcaccgaaaattccataggcattatctggcgtctccactacataccaacctgggatttctttggcttcactgatataaggtagtccgacttttccgcttagaatcgttggctctgttaattgattcccttcactatcttggtatttcacagtcactggtgccgcatcactgcgttcgtatacatacaccacttcctgcgcttcctcattgaaaattccagaagcattatctggcgtctctactacataccaacctgggatttctttggcttcactggcatatggtagtccgactttgccattcaaaatcgttgggtcgcttaattcgttgccgtctgtatcttcatatcggaccgtaactggtgccgcatctgagcgatcatacacgtagaccacttcctgcgcttcttcaccaaagagtccggaagcattatctggtgtctctactacataccaaccagggatttctttggcttcactggcatatggtagtccgactttcccacttagaatcgttgggtcgcttaattcgttaccgtctgtatctttatatctgactgtgactggtgccgcatcgctgcgatcgtatatatacaccacttcttgcgcttcctcgctgaaaattccagaggcattatctggcgtctctactacataccaacctgggatttctttggcttcactggcatatggtagtccgactttgccattcaaaatcgttgggtcgcttaattcgttgccgtctgtatcttcatatcggaccgtaactggtgccgcatctgagcgatcatacacgtagaccacttcctgcgcttcttcaccaaagagtccggaagcattatctggcgtctctactacataccaacctgagatttctttggcttcactggtatatggcaatccgactttgccattcaaaatcgttgggtcgcttaactcattgccgtctgtatctttatatctgactgtgactggtgccgcatctgaacgctcataaacatagaccacttcttgtgcttcttcagtaaatacaccgactgcattatctggtattttgaccacgttccagcccgcgatctctttcggattgctttcataaaccataccgacttttccacttaaaaccgttggttcactcagctgttcgccttcagaattctgatacttgactgttacaggagctgcatctattaaattgggctgccaaacatacgtatcggagtcagtttctccattgtagtttgccattaactcggaagccgaccaaatatttagcccattcgggaaatctattgatcctgttccaacattgacccattttcctgtataaatttctgatgaaattggactaggcaacattgcatttgtataaaatgaaaatgactgtcctaatctgatgatcttcaacgattgcataccgctaaacatagaagacatattcgttaccttactggtatcgaaacttgatatatccagactagagactctatttaagccctgaaacattcgatccatattcgttacttggctagtatcaaaattgcttagatccatactgaatgtatcgagatcacttcttcttaggtttgcgaacatcaaagacatgtccgtaacatttctcgtatcaaaattgcttaaatcaaatttatcgatattaatcacattcgcgaacatcaaagacatattcgttacatttcttgtatcaaaattggagacgtccaaactagtcaaatcgaacagtccattgaacatcgcatacatattagtaacgttacttgtatcaaagttggatacatcgagctttgttaaccctcgagtattattaaacatgccagacatattcgttactcggctagtatccagcttgtccaagccttctatttcagtaaggtcagcccacgtaccgccggagttaccaaataaataagaagaatcctcaccagcaataacattcccctcgaacacaatttttttaaccctataccgggaccaagggttaatctcagaagtagatcggaatgttccagatccgatatggagaactccgtcataagtgatataccaatctgaagtaccataagttcccgaggccatattttcagtaggatcttcagtagtttgattctctattacatctgtttcattttgacttctaacttcattctcacttgaagaagaagtcgattcgttcagttcgacaggttctgaactatctgattgactaagttcactgggctctgtattccttccatcattatctttcgttgaatgaatgtgttcatccttactatcacgagacattaaagtttcttcttgttccacagcgatcgtgctctctactgtatcctgtatagaaacagtatcttcagtcactgaatcagcgctaacaaccattgtccatggcgcttgatttaacaacaagcctcccaacaatagtatcctgctacactttcccataccaagtcatcctttctcttttagtctttctctttagtatccatattccgattatcatcaatggatgttattacctacatgttttgtattgtctctgtgctaaaggtgttttgttaatcaaaccatgcgctttacctgctgattcgctttcaagctttcaataaggttcgatctaaagaattttctttaaaaagttgttcccaaccctcaacttcgacaaatggattttctgaggctttctgtatgcatgtaccttcttctagtgccaaaaatcttcgttttttagataatagtttctcatttagacattttttcgacaaaaatctataattcaagttttgtaagacattcgaagttttcggatgtctattttcgtattgtcccaaaaacgaaggtttttgagacagatagattattttacattctctgaatatattactattcatcgcagctttctcttaatcaactatttctccagacagtgaaatagttgatttgctttttactccaaccttatctacagttccaaatcaaatcgcttcgcctatccttgctttttttgttaagataaagaaataatgagtaagaatttaggtgatgatttatgcgactgttgtttttctttttccttttcacatttttgattggatttctcttctatttattgacccgtcgcacgatcgccgaagtctatcatgaattgaccgataagaaccgcttctttcgaggcatcaaagctttcttcattggaatttatcgcattttgacttctgtttaaaaaaaactgtccaacaacagatctcttgatcgttgctggacagttttttgtttgattcgtcttctatttcaatggtttccattgccaatcttggacttcagcaatgtcatagccattctcacggataaagtcatggtgataggcaaccgtctctgtcattcgttgcgcaaagtcggcagcttgttcgccatagacccactcagcgccgtctttcgctaaatggaagcgatcaagttcagataagatccgcatgtcaaatggtgtggtgatatcgccattttcacgatagccatgaatatgcagacgctgattcttgcggccgaagaaaatgtcccgaatcagtccttcatagccatggaaagcaaaaatgattggcttgtccttagtaaagtaagcctcaaattcttcatctgtcaatccacgaggatcgacatccggatgacgtattttcaataaatcaacaacattgataaagcggattttcaactctggaaacgcctcattcagcaggcttacagcagcgagagcttctaaatttggctctgtccctgctgcagcgatcaccaaatcaggttctccttggtctgttgaagcccaatcaatgatctttaagccgtcttttaccaatatctccgcttcttctgccgtataaaactgcggccgaggatgtttcgaagaaacaatcagattgatctgttcttcagtttggaatgtttctgccattacagccatcaagctattggcatctgctggtagatagacccgtacgaattccgcttttttctcagcgatatgtgtcatgatccctgggtcttgatgggtatatccattatggtcttgctggaatacggttgaggaagcaatcaaattcaatgacggataggcatggcgccaaggcaattctttcgatttacgcgtccacttaaagtgctgagtgatcatggaatcaaccactcgcaagaaagattcatagctagcaaaaaagccatgacgcccagttaagacgtagccttctaggaagccttctgcttgatgctccgataattgggaatcaatcacccgtccggtagcacttagccattcatcatagtttggctgttttggttctaaccattggcgatttgtcacttcaaaaacatggttcaaacgattggatttggcttcatccggaccaaagattctaaaattagtcgggttttcaacaatcaaatcccgagcaaactttccgaactccatcatgtcttgagcagtggttgagccaggaacaccaatatcgatcgcatgctgtcgccaatcggtgattttcaacggttgaggatcgattcccccgttagtgatgggattcattgccatccgttgctgtcctttcggcgcgagttcttgaatctcagccttgatgcggccagattcatcaaagagttcttctggcttatacgatttcagccaatcgattagtgcatccacgtgctccatctgatgcgcattgactgggataggtacttggtgggcgcgaaaaccgccttcaatcggctctccctcccaaatttttggtcctgtccatcctttaggtgtgcgcacgatcagaacaggccagtggggcatgactgcttcatcagcttttccttgacgagctttggtttgaatcgctttgatctgctcaacggcgcggtccaatgctctcgccatttgcggatgaacagtagcaggatcatctccctcaacaaaataaggtgtccaacccattccttcaaaatacttggttaggtcttcatcagatttgcgagccagaatcgttggattagagattttagcaccgttcagatgtaagatcggcagaacagccccatcatttaccggattgataaatgtattagaaaaccagctgcccgctaacggaccggtttcagcttcgccatctccaaccacaacagcagcgatcacatcaggattatcaaggacagctcctgttccatgcgcgatggaataacctagttcgcccccttcatggatcgatcctggtgtttctggtgccgcatgggaagcaattcctcctgggaaggaaaaaattttgaaaagatgctgcatcccggcctcatcttgggttacttctggatagatttccgtataacttccatctagataggcattcgaaaccatcacctgacctccatgaccaggtccttcaatgtagaacatattcaaatcatatttattgatgacacgattcaagtgggtgtagataaaattctgaccagcaatggtgccccagtgaccaatcggattgactttcagatctttttcttcaatgggccgccgtaacagtggattgtctttcaaatagatttgtccgacagaaagatagttggctgcccgccaccaagcattcattttgtcaaaatactcttgggtatcaaatgttgtctccatactactcctccttgctttctcttaattaaaagtctatgcgtctcgattttaaaagtcaattttgctgattgtacaccttgcatctctcttatgatttgtctgcttcagcacaagaaaaaacaagaccagagttcctcccaacatgtttcagtatgagagggtttggtcttgtcagtgttggctcttttctgttgtcttgtctacttttttaatagctacttgatcgtcacatagtccaaaccaacgagttttgcccacgtctcgatttgatctgacgtcaacgctaatgaaacaaccgtatgatgtccgcctcccgtttcgatccattgtttgactccttgatgaaagtcgggacgaggcgtccacatcacgcgagccaccggcaatttaggtgcggcttctgttggctcaaaagcatcgacttcattgatcaataatttatagtgagtgccaaagtcggccatagatacaactactcctgcgccaccttgtccgtcaaagactaatcgtgctgggtcttctcgatcccccattgatagcggcgaaacgacgatttttggtttattgacagccaatactggatccacttccatcatatgcgactgcaagatggcttctttgccttcggtcaactcataggtatagtcttccataaaaccggttgctttattatgtgccatgatcttcataagacgatcgatggctgctgttttccagtcaccttcaccagcaaatccgtatccttccgccatgagtcgctgtacagctaatcctggtagctgttgcatgccataaagatcttcaaagttggtcgtaaacgcactatagcctcctgcttctaagaaacggcggatgccgatttcttgtttggcctgtactttcacatgtgcttcccagattgcggcttcataatctccctgatcaaactcatacaaattacggtattcttcaaacaagtcattgatctcttcatcggtcacagcatcgattacttgaacaagatcaccaatgccaaagtaatccacggtccaaccaaattggatttgtgcttcgactttgtccccttctgttaccccaacattgcgcatgttgtcgccgaaacgagcgactttgatagcaaaactttcattgtaagcaaccgccacatccatccaagctgcgatttctttttggaccgtctcttttttccaataaccgacaacgattttgttttgtttctgcaaacgcgcattgataaaaccatattcgcgatccccatgggctgcctgattcaaattcataaagtccatatcgatggtctcccaaggaatgcgttcattgtattgagtcgccaaatgaagcaatggtttttgcagcagtttcgttccccggatccacatttttgctggtgagaaggtatgcatccaagtaatgacaccagctacttcatcccgataattgacttccttcatgatctttgtaatcgtgtccgcagtgactgccaattcttgtaaaacgactggataaggcagatttccactgtcattcaagcgtttgaccatttcagctgcatgatcgcggacttcttgcaaggcttcttccccatataagtgctgagatcctacaacgaaccaaaattcttttttactgattgctaacatattgtctgctccttcttgattatttttgcccatagtaggcatctttgccatgttttcgtagataatgcttgtcaaggatgcgctgcggcagttccggtgcataactattgatctgacgcgtcacaacgttcatctttgctacttcttctaaaacgactgcgttcatgactgcactttgagcatctttgccccaagtgaatggaccatgtccctgcagcaagacgccgggaatctctaaaggttggataccgcgttcctggaaagtttcaacaatcacgtttccagtctctgcttcataaccacggtcaatttcttcctgtgtcaaaaagcgcgcacaagggacactgccataaaaggtgtcagcgtgggtcgtgcccattgccggcaaatcaactcctgcctgtgcccaacttgttgcccaagtggagtgggtatggacgatgccgccaatttctggaaacgctcgatacaatacagcgtgagtaggggtatcagaagaaggattcatctttccttcaacaacgttcccctcaaaatcgcagaccaccatatcactagcttgcatcgtttcataatcaaccccactaggtttgatcacaaatagctgctggctgcggtcaacggcagacacattgccccaagtgtatttgatcaagccctgttttggcagagctaaattggcttggaagacggcttctttcaattgttctaacaaatgactcacctctatttttgttttaaatcaatccatcgatcgctgcttgctcgatcggcagaccgtgttggtagcgcttaacaaactcagtaaaaccaactatatcctcaggtaatggcgctaaagttgtcccttcttttccttggaaaactctggataaaaagactgtaagtgtttcttctaccgatttttttttcataaatgctgccagtaaagcgatgccccaagcaccaccttctcctgctgtttccatcaccgtcactggtgcttccatcgcagcagccaacacccgctgcgcaacagtcggagtcttgaaaatccctccgtgtcctacgattcggtcgatcttgacttgttctttagttaggatatccatcccgatcttcatcgcaccaaacgcactaaacaaatggagccgcataaagtttgctaaagtaaagcggctttctggggagcgaacaaacaatggtctaccagctgctatttttgtaatattctctcctgagtaatacccataagacaacaacccaccacagtcaggatctcctttcagtgcttggttgaacaatgtcgtaaacagagcttctgtgctcatttcgacccctgctgcttctacaaattcccgaaaaactttgacccatgcattgatctccgaagtacaattattcgtatgaaccatgccaactaaatctcctgctggcgttgttaccagatcaatttctggatagactttagagagaccgctttcaagaacgatcatagcaaaagctgatgttccggcagagacatttccactcctttgcgcaacactattcgtcgcaaccattccggttcccgcatctccttcgggtggacagaatggaatacccggcaacaatgttcctgttggatctaaccgcaaagcacctgctgccgacaaagtgcctgctgcttcaccagccactaagactttgggcaaaatatctgctaactgccaaggtaaattttctggaaggatcagatcatcaaactgggccatcatctgtcgatcatagtctttttgtaggctgtcgattgggaacattcccgaggcatccccaataccgattactttttcacctgtcagctgccaatgaacatagcccgctaatgtcgtcaaaaagttgacttccggtatatgcgcttcttgattcaaaatggcttggtacagatgagcgatactccagcgttgcggaatattgtattggaacaattcagttagagccttttcggctgcttctgtgctggcattgcgccaagtgcggaaaggcaccaataactgatcattctcatcaaaagcgagatacccatgcatcatagcggaaaaaccaattgaaccaattctcgtcaaaggttccccgtatcgggattgaacagaagctgctaatgcttgatagctttcttggattccttgccagacagatgccaaagaataggtccagacaccatctaataactgactctcccactcataactaccggttgcgatggtttgaaattgctcatcgatcaagacagctttaattcttgtggatcctaactcgattccaagtgccgtgcgcccttcttgaatcgcttcacttatttgctgctccatttctcttctctccttttgaattttgatatacatgaaatcacgaatggctcatgacggagccgcgaacaatcaattctggctcataataaaacgtttcttccaacgtagttcctgaggtgacccattgtgccgctaaaatccccatctcttcctttgggtgagccagtgtggttattcctggtgaagtcaatgtacttaaaggtgaatcatcatttcctacaattgaataatcttctggtacacgctttccattggcttctaattgctggatcaacccatgtgcaatttcatcgttataacagacgattccagtgatctcattcgattggttcaaccggtcaatcgcttgtgcaatgacagcctctttggtttctgtggtataagtcacgacatcttcagcagcaaatgttttctttgcttgttccaaagctttgacaaaacctttcatccgatatttcccttgtaaatcatcaattttagtgatcagcatcaagtgttgatgctgctgttccaataaataattcgtggctagatagcctgaacgagtgtcattgacacaaatatgaggcagatccagttcttcatagtaggcattgatcatcactagcggaatccctgcttctttcaatgccatgtagtaggccaaattgggattgtattgactgctcttcgtcggttcaacgattaagccatctactccttggtccatcatttgttgaaggcaagctcgttcttgttcatggtcattatttgttgatcccaacagcaaagaatagccttgttcccgcaatgtctgctcgactccgcgcataattgaagggaagatataatccgacagatacgtcatgatgatgccaatcgttttatggctgcgttgcggaagattctcaggttttgaaacgtacgtaccagatcctctttccttacgtaaatagccttcgtttactagcaaagcaatcgcttgtcgcacggtatgtcggctcaaatgatattcttcttgtaatacagcctccgaaggaatcgtcattccttctttataggttcctaaacggatgttttcccgtaattcattcgcaagttgttcgtacttcgttgtcatattaatcccatctttcgaaagttgtccgtacatatagtatatttggaatgcgctttcttgtcaatgtaattttgtaaaaatcaattttttacctgaagcagaaatataatagtcagtggcagcctctgctaaatgcacgattcgatcaattgcaactgttcagaaaagatgaattgctatacaataaatgacaacgacagcaaaggaggttcttcctattttctcttttaaagatattaaagaaaattacccaaacgctgctttgcatccagcaaaatcaacagatccaggaatcgaatcgattccatttggtcagaaattcatctggctgcctactgccgatctatcggcaaaagaaagaatcatgctgcaattaggcagcggtgcactgtttccggtaatcgacaaccgttttcgaccatggtacccgattttatttgaacatcagccgataaatgagaccggtgattatcgcttgttgcaagtgaaatttacgagtgggatcgatttattgcagactgagtggctgcaagagatccagcaaatgctcccccatgtcgtcgacctcttttttgttaccgaagacagtgcgttgattgttgaacagcgggctggtgagaacttgcgcttagatgaactggatggtttatttgttgctttagatatggattttgactgctactcgcatttatttgtagggccgtttcaccattcgagccatgatttcacacttctgctgactgaagaaatgactctttttcaacaattgactcgacaaaccaatttaaaaagtttggatctggctacatctctgatccatttgctaagcactgccggttccgactatcaactattatttcgaacactttatcaggattggtttcaggaaagcgatcttatccatttgatcgagtcgctgtggaaaaatcaaggaaatgccagttctacagccaagtcactcttcatgcatcgcaatacactactttataagatcgataaattccaaagtatgactaatctgaacttaaaagaaatggatgatctgctgctgtgctattttcttatcaaaaatttcgctcatccagccgattgaacaacttgcacaagaaaacgttttttttcttgtgcatatttccgttgctgaatcaaagcgttttcatttatgatacaggtgtaaactaaatggaaagaggtaatcctaatggtagaaatggctctgaaacacgtgcataaaaaatacgacaacaatgataattattctgtaacagattttaatttagatatttctgatcgcgagtttattgtttttgttggaccttccggttgcggaaagtcaacaacgctgcggatgatcgctggattagaagatatttctgaaggagaattatccatcggcggcaaagtaatgaacgatgtcgcaccaaaagatcgtgatattgccatggtattccagaactatgcgttgtatccacatatgacagttttcaacaacatggctttcggattgaaattacgtaaatacgataaagaagaaatcaaaaaacgggtagaaaatgctgccgagatcttaggattgacagaatatctagaccgtaaaccagccgcactatctggtggacaacgtcaacgggtagctttgggtcgtgccatcgtacgtgatgccaaagtcttcttgatggatgaacctttgtcaaacttagatgcgaaattgcgggtagcaatgcgtgcggagattgcgaaactgcatcaacgtcttgaaacaactacgatttatgtaacccatgaccaaacagaagcgatgacaatggcagaccgaatcgttattatgaaagacggatttattcaacaaatcggttcaccgaaagaagtgtacaactcacctaaaaatatgtttgttgccggctttatcggttcacctgctatgaacttctttacagttactttgaaaaacggcatgatctcagacggccatggattaaacttacgtattcctgaaggcaaaaacaaagtccttatcgaaaaagggtacgaaggcaaggaattagtctttggtatccgtccagaagatatccacagcgaacaaatcgcattggaagcttcaccagaagcaactgtccgtgcagaagtagtcgtttctgaactgcttggtgctgaaacaatgctttatacaaagattggttccactgagtttatctctaaagtagatgctcgtgacttccatcgtccaggtgaagtgattgatcttgctttcaacatcaacaaagcccacttctttgataagacatctgagaatgtgatcacgttaccttaatttgtagttttcttgcactgtccttggtttgccccctagacagttgcaattaactaatatccacttttattccttatttgtatcccctgaaaacagacagccctgcggctgtctgtttttgggtggattctctttaggtgaagggactactttgaagctctcttctcaagaaagcgtacataaaattttttgatcgttgggtattgacgatatgccaagaaaacaactttgattcttttagtagtaactgggtcgacatcaatgattttcttatacccgacagttccgcattctgctaaaaatcaatccttgccatctttttcataataaagtactgctttttcaattctctgactctcgcggatttcttcttgtaaaatcactgtattgatttgtgttggttgtgcaaaagtcactgttacccacggctcatgatcgttatccgcaggttgccaatacgtcttctttgatgaggtaaccttctgcaggctttcttgatcccagggtgatttttgggaagaagctgtgatctgtccttggtacaacggctgatccgtttgtaatggccgtagatattgccctaattgcatcagtgactgctgatctttcgggtggatcgccccattgggcattggcggaacatttaataaaaataccgcgtttcctcctaccgctttccgatacaaagaaaataatgtttcggcacttttcactgctgtatcctcttccggatgataaaaccagccgggtctgattgatagattgacctctgcgggataccagactaaatctctgctggaatcgtagtttctcaatacagatcggctacctaaatcttctgccatacttgagattgtcgtccggaattctgctgtgtctgtttgttgtgatttttcggccgtcttttcggcatccaatagctcacggggaacgacactccactcattctgccttgtgtgcccggcttcatttccgatccagcgaacatctggaccgcaaacggcaatcacagcatccggctgtaattgccgaatctgttgataatatctttgccagtcataaaactgccgctttccgttaggtccttctccattggctccatcaagccacacttctgctatttcaccatactgcgtcaataattctgtcaattgacccacatacacctcgttataggcctgtccggtgccgtagcctgcggcgtgctgatcccacggagaaagatagatgccaaacgccatccctgcttcttgacaagcctccgacaattctttgactaaatctcctttgccatttttccaaggtgtataagcgactgtctgctgcgaatagttgctgggccataaacagaagccatcatggtgcttacaggttaagatcatccctttcatcccgctgcatttgcaaagcgtgacccactctttacagtccactgcttgcgggtcaaatagtgctaaggattctctcccatttccccattcccgattcgtcatggtattcaagccaaaatgaataaagccataaaattcccgtgcttgccatagtagttgacggtaactcggacggatcgccgtcaattcttcaactttcatcgcacttcccctttctccaactgattgtcagcaaactggaacccattcagataagtgttcttactggcgatggctcactaaccgcagttgttttgtttttggtctttacagcaaatagagtagtagatgccaaatgaattgacaagccactactctaaattacatagtttagtttgtttcacatagtttttttccacaggttgcgttcaggattgcaacaccagaatagccgagaactaattcaactgcaataatgttaaactatctgctaagaccgcttcaccatcaagaagctcgtaatcttctggtgtgattagtttatacggaactgctttatagttcaaaaaatcttttaagcgattgatttcatatttcgattgtggtccaatcagtaatgcatcaacagtctgattttgaatgatttgttcagcaatgattgctggtgctgaataaatatggacagttattccttgttcatccgctgctcgctgcatgtttttcactaatagacctgttgtgatgcctgctgtacagatcaataagatcgtcttttgtgcttctgtccccatatttacagcctcctaagatattttctttttcttattataaatatctaagacaactgctaacagcaagatcaatcctttgattgcctgttgccagtcgacccctacacctagaatcgacatcccattattcagtactcccatcactaatccgccgacgatcgcacccatgatcgttccgattccgccagaagttgaggcaccgccaaaataaacggcagccatggcatccagttccatagaggttcctgcttgtggtgtcgcagcgttcaatcgtgcagccaaaaccaaacctgccaatgccgccatcgcgcccatattgacaaagacccagaaagtgatttttttcgttttgattcctgacagttcagcggctttcctatttccaccagttgcatagatttgacgaccggcaactgttttatttgttaagaatccatatgctgcgacgatgactcctaataaaatcaagatgatcgggtaaccctgataagaagcgaacacataagttgcgccaatgaaaacgacaccgatgaaaagagctttgaacaaaaaggtactggtggactctacttcaaacaaatttttcttgcggcgttcccgggttcgccattgaccaaaaatcaatagtgccgtgataccgacaccgataatcattgaaaggagatgaatatgatcgctgctgacaatatcaggtaaatagcctgttgaaattttttgaaacgaggtaggaaatggtgctaaagattgtcctcccagaacgacttgagtcaatccacggaacatcaacagtccagacaacgtaacaataaaagcaggaatccccacataagctacccagaaaccttgccaagcgccaatcaacgcaccaatcagtacacataatggcacagccacccagggactcatgccattattgaccatcaagacgccggcgattgcgccaacaaacgccatgacagatccgacagacaaatcgacatgccctaacaagacaactagtaacatccccgcagctaaaaccaatatatgactattttgcaaaacaagattggtgatgttcaatggtcgccagaaaataccatctgtcattgcttgaaaggcaatcaataagacgaccaggataataatcatgctgtatttgctaaaaatctctaacgctttgtctttgatagaatgtttttgcactttttttaatttattcgttgtttccatcctaaaccccactctcttctaatgtcatcaagttcatcagcagttcttgatccgcatcttgccgcaatacttctcctgtaaaacgcccttcattcatcgtatagatccggtcacacatacccaaaagttccggcagctcggaggaaatgatacagattgctttacccgcagatgccatttcttcaatgatcgtataaatttcatattttgctccaacatcgattcctcgtgttggctcatctaaaaataaaatatccggttccgtcatcaaccacttagccaaaacaactttttgctggtttccgccgctaaggctgccaacattttgatagattgaattggttttcgtccgcatttttttgcggtattcttctgccaaaattacttctttctctttgtccaaaacaccgttgcgactgattttattcagactagcaatcgttgtgttctcccgaatgtccatcaatagattaagtcctaatgctttacggtcctctgagacatacgcaagcccatttctaacggcagctggaacatcttttacggagatttgttgcccttctttatagacttcgcccgtgatattgctgccataggaatgcccaaagacactcatcgcaaattctgttcgtcccgcgcccataagcccagcaatgccgatgatttctcctttgcggatcatcaaattgagatcttcgttcacgattcgatttgtatcgataggatgatgaacggtccaattcttcacttcaaaaaaaggatcaccaatctggggatgccgttccggatagcgattcgtcaagtcacgaccaaccatcccgcgaatgattcgctcttcagaaatctgattgccagccatcgtttcaatggtttgtccatcgcgcaaaatcgtgatgcgatcggcgacattgactatttcattcaacttatgagaaataatgatggaagtaatcccttgattacgaaattctttgatcaattctagtaaattggcactttcttcttcattcagagcggctgttggttcatctaaaatcaataatcggactgatttagaaaatgctttggcgatctctactagctgctgctgccctacaccgatttgtgaaaccaatgtattaggatcaagacgcaagccaactgtttttaataaattatcggtcttcttttctgtgatattccaatcgatgatgccatttttggcttgttcatttcctaaaaaaatattctctttgatggataaataaggacttaaagccagctcttgatgaatgattacgatccctttttcttcgctatctcgtaaatctttaaatttacagagctctccttcgtaatatatttcaccttcatacgtgccatgtggatacaaaccgcttagcacattcatcaatgtagattttcctgcgccgttttcaccacatagcgcatggatctcaccacgttcgatcgaaagatttacattgcttaatgctcgtacgcctgaaaattctttgacgatattcttcatttcgagaatataatctgccatgtcctttcacccttttctttttatgtagtcagagattctgcagaagaaataaaatgatccattcaaaagaacggctctttgacaaacaagaaagaacagggcaaaacattggagtatccgctgatctgccccgatcattatcccttcagctgctcttttaccttttttgcgcttttgacagccccactgtcaacaactagcccagatctttttccgtgtaatagtcactgtccacaagctcttctttataattgctgctatctacagagactggattagatagataggtcggtaccactttgaccccattgtcataagtttcggtatcattgactgggacttcttcgccattggcgattgcttcgatcatttcgatcgtgtttttggctagaactcgggtatctttgaaaatcgtttgcgtttgttctccagcaatgatcgatttaactccagcaatggttgcatcttgtcctgtaattacaggtaatggtttttcagaagaaccataccccacaccttttagggatgagatgattcctaaactgattggatcataaggagaaagaacggcatctaatgttttatcggtatagttggcactcaataagttgtccatccgtgcctgtgcagtagaaccatcccagcgcagtgttgcgatttggttgaaattcgtctgacccgaaggaaccactaattgaccactatcaatatactgttgaaaaacagacatcacgccattgtaattgatcaacgcattgttatcatccggtgaaccaccaaacaattcgatattgaagggtccttttccatctttcaggcctagcttgtcttcaatataagaagcttgtaaaacacccacaccgaaattgtcaaaggttgcatagtaatcgacgtactccgaattcatcaataaccgatcataagcaatcactttgatgtcctcgttatgagccttttcgagaacatcggtaagcgcggaaccatcaatagaagcaatcactaatgtatcgacgcctttagtgatcatgttttcaatttgagcgacctgattctcaaccttatcttcgccatattgcaagtctgttttgtagcctaacttttccagttcatctaccatattgtttccatcggcaatccaacgttctgctgattttgtaggcatagcgattcccacaaaccctttgtccccgctgctggctccaccactatctgagccgtttccgcaagctgccaacatccctcccaagagaacggttgaagcgatacctacgatttttttcattgtgcttttcatttattgatccctccatacttttacttacaggctaagtatagaaaaaacagcaatcgcttacattaactatttttggtagtttctttgatttcttgggacattggaattcaaaccttgattttctttcgattaccttgttttttttcggaatcttgaaattaagaaaagcgcttacctttttttggtaaaatagaggtcgggggtgaaattatggataaaaaaaggttacacatcttcctttcgatcctgcttatgaccagtcttagcgcctgccaacgaccatctgaggggaccaatgaatctgctaaagagagcattgtcattggcttttcgcaatctggtacagaaagcagttggcgtaaacgtcatactgaatcgattcggacagagttagagaaagaagggtatgaagtactttatcgaaatggctatatgaatcaagaaagacagatccaagatatccgcagttttatcgtttaccaagtagatgcaatcgtctttactccattacaagaagatggttgggaaccaatactcgaagaggcggccaatgcaggtatccctgtttttatcgttgatcgtcatgtggatctggcagatccttccttatttttgacacatatcggtcctagtttcaaagcggaaggcaatcgagctggcctttatgtcagcaattatttcaagcatcatgaaaatgaaacgatcaacgtgctggagttgaccggactcagtgatacatcccctacgcaactacgttcagatggctttcgagaaaccatcaaacgagattatgcgaaaaacaatgtcactattcaagtaactgatgccttgaatggcgacttcattcgtagaaaaggcaaagaagtgattgaacaatatattgcagaaggaaaaatggccgacatcgatgttttattcagtcataacgatgaaatgactatcggcgcgttagaagccttgaaacaaacagatatcgtccctggaaaagacattgttatcgttacgattgatgctcaaaaagaaatgatcgacaatttgaaaaacggcatcgttaattgcgttgttgaatgtaatcccgatgctggtatcttcgttaaaaatgctatttcccgttatttaagtcggggcagaagtgcagttccaaaagaaatctatgtccacgagacagttttttcaagtgatatggattttgaccagattccaccccgaaattattaaggagtcattcatgaaaaagacaagtataaagggcatcttccaacaaaccaataaattgatgatcttagtcgcttttcttcctttattgatcagtagtatcttttattcccgccaaatttttatttatcaaaatacgatcaacaatattgaagaagccaatcagctctcgggtaaagtggatgcaattgttttagaagaaatgtgggatcttgtctttggccaaaagagcgtggcggatgttcaagtcaataacgtcattgaagaattgcgcgcggatcttgaccatatccaaacaaatacgaatacagccaaagaaaagaacacgttggctgttgccttacgtacactggattcattagaaacctaccaaaacaagctcatcgaaaatattgctaacgatgaaccactagaaaaaaatcaatatgtgatggtccaggtggattctgtaattgaattattatctgaaatcctgcaggaatttgttcgtgtagagattagtttggcaagtcaaaccaatcaagatttgattcaatctgtcttgttattgatcgcttttcaattgcttttgattcttttgattatttactttatttctaaaaatcgccgctttgttcgcgaaaatctccaaaatccattggatcgtctagtcgaattatctgatgaacttgcccaagggcatctcggctttcgagcagtcctgcctgatacaccggaattgcgcacattgacgagcagtttgaataaaatggcggatgatttaacccgtttattagaagagaatgctttgaaacaataccatttggctcaaagtgaagttcgtgtgttgcaagcacagatcacgcctcactttatttacaatagtttggatgcgatcgtctctttgatcgaagtagaacgatatgaacaagcaactgaaatgacgtacgccctctccgatttttttcggatttcactaagcaaagggcacgactggatccctctttcaaaagagttgcgccatgttgctgactatttaacgatcctaaagatccgttatggggagatgctgacctatgaaatcaaccagcagaccacttcccaagacctactagttttaaagatgatcctacagcctttagttgaaaatgccgtctatcatggcaccaagtttgtacgccgagtaggaaaaatcaccatcacgattcaggaatatgaacagacaatccagatgtctgtccgtgataacggtattggcatttcccacgaacgattaatggccatccagcataatctgaaagaaaatacagatcccgatccagaaaatgggtatggtctttataatgtttatcgtcgtctattactaaattacggtagtgacgtacaatttgatatcgcgagtattgaatcacaaggaacaacgatttcgatcatcgttcctaaaaaaggaggagcccactaatgtacaaagtcttcatagttgaagatgaacacctgatccgtgataacttgcggcatcagattatttctctagctgaaaaataccccattatttatagtaatgaagcggcagatggcgagttggcacttgcatcgattcttgacattcgtccagatatcatttttacggacatcaaaatgccttttatggatggactgacctttgccaaagaggccaaaaaattattgccacttgttcgaattatttttattagcggcttcgatgattttgattacgcaaaaacagcgctacaattgcaagctgatgactatttgttgaaaccgatcaaaaatgaggaccttgaacagacattgattaaagtcattgctgcattggaccaacagtcccaagaacaacactatctctcacaagatgatgaactcctgcgaatggaggtcagaaagaatctctttttgaatactcttttcgcaagtaaaatcacaatttcagaagctttccagcaagcgaccgagctaaagcgttccttttctggtaaacaattttgtgtcttgttggccaagacaccatacaatcagaatttttcggattatacccgcttcagtaagcagttgacttctacttatggttccgatgaaacagtcttattctccagcatttccagtcgcttcatcaaattcctgctttttgatttcaacaaagatgctgtactcgagaaagcctaccaaatggcacaagcgctcacccatgactcaagtgaggaagtggcagttgccctcggaccggtagttgagcggttttcggacattccaacttcctatcacaaagccaacgggatgttgaaaacgtatggcggcatccgcaaggaaaagatcattagctatgaggatgatatgaaagaaggagaattatctcctacgaatcctttcaaaatcgaccttgccgaacgaatctcccagactgagccagaggcgatcaatgacttagtcaatgaaatcatgtccgctcaaggaactgcagaaagaacccaaatgtatcgtttttttgttctggtagaattgattgcgctggtaaaaaagcgtgaaggcaaagaacaaaaggacttgctagctcaaactgcggatttagactatttatcccaactgacaagtgagccacacaactaccaagacaaagtgactgcactgcttacatacttagtcaagcagcaaatcaatccggcaatggcaaagtatcaaagtgtgatcagtcaggcaaaacagtttattgacaaaaatttttctgatccaaatatttcgttgaatgtcgttgcagaaaaagtcaacttgagccccgcccatttcagtacgattttctcgcaagcaaccgatgccacattcattgaatacctcacagaacagcggctttcattggcaaaaaaactactgatcacaacaaatttgcgcctttccgagatcgcctttgatattggttacaatgatccaaattacttctctttcctattcaagaaaaaagaacagatttcacccaaagagtatcgtcagatccaccattgacagaagttcaaaaaaaccagcccaaccttatacataaggctggactggttttttaggctagcaaataatgcaagaagcaaaatcgttgaacgaacaaaatcaatactggcgtcttgccttcagccgttcgtcattcttttttctccatcgccgcttttaatgctgcagccaatggactttcttgcggttcttcctgattgatcttttgcatcaaccggcgttcttcatgtttggtcaattttttgttacgctctttcttatctgccattttctcggtgatcccatcgaacttgcaacggaagaaagcaccattctttccttcaatgatctccatctttcgatgacattgtggacagcgatggttagacactttaggatctttacgacgacgatacttacaggtttgacttgaacaaacatagatcttgccatctcgggtactcttttcccttaatggttccccgcattcaggacatcgtttttgcgttaaggaaaagtcttgatatttgctttcgctttgcttgatttctttgactaattgcttggtatgtttttctatctgagcaaggaatttttgttccgagtattttcctttagcgatcagttctaattccttttcccatttctccgtcaattccggagtgactaaagatgggttgactagcaccaacaactgcttgccttttggcgaaacttgtaaaccgctaggtgttcgctccatcaactctgacttgatcaatttctcaatgatctcagctctcgttgcaggcgttcctaagctatgtttttccattttgcctaagagcgtaccttcattcaatggtttcggcggcgtcgttagttccttttgaatactgaatgttggtttgacactcatttgttcctgccaagaaacagtggttgcttcttcttttgactttttccagcctgcctcgatcacagtgttatgggtaaagacaaacacttcattaccaaatttgactgtaactttttgctgctgcttcttatgcggtttggcaaaaagcatcaaaaaacgttcaacgatcatttgatagattcgctgttcgtcattactcaatttttcataacgtgcccgttgctctgtaggcaacaaggcatggtgatccgtaactttcttatcattaaacacagcttgctgctgaacttgaccgccatttttcaaatagcttttgacttcaggagcaaaatcggccactgcttgcaaccgttctttcatcgttgctttcatgtcactggttaagtattttgaatcagtccgcggatacgtgacgattttatgggtttcatacaagctttggaccaatgacaacgtttttttggcagaaaagtcatagcgatgattggcttctcgctgaatctcggtcaaatcatagggtaaaggagccgcttcggttttgatcttctcttcaatagacgcaacacggccattttgctgactcatcttttgaaccagtgcttcggcttcgctacggtctttcaattgataaggattgctttgttgccgctttgctttactgtcgcccacttctaagttgatgacataataggtttgggggcggaaaccttcaatctgtttctcttgtgcgcgaaccaaagcaagcgttggtgtttgaactcggccagcgcttaaattatcctgatatttcactgttaaggcacgggtcacattcaagccgactagccagtctgcttttgcccgagcaatggcagaatgatacaagttatcatactgcttcgccggctgcaactttgagaacccttctttgatagccttaggggtctgagaggaaatccaaagccgcttgacaggtttgtcacagcggacccactctaagatccatcgggccaccaactcgccttctcgtcctgcatcggtagcgatcacgacttccgacacatctttgcgatgtgccagttgtttgattgctttcaactgatgccccgtcttaggcaatggtttgatcccgatcgttttgggaaccatcggtaatgtttccatctgccacgaggcccattctttgtttaaatcttcgggcatttttagacctaataaatgaccaagggcccaagtaacgattaccttgggtccttcgtaataatttttatttttttgattacaacccaatactttgctgaggtctttggcaacgcttggcttttccgctagaattagttgtttcataaaaatctttcctgctttcatcgacgacttgttggtattctttaagtagtgccaacccaatatattgttggagataatcgtcgcattcttcacaccagcgttcttcgtcttcattccaaaaagccgtcataaagttggtttttgcatttatgtacgaatactctttccgaatctcgtgccatttttcttcgtaaaatgactgtgcttccgcaaaagatgcaaatgtgaacgcctcttgaatatctgcctgccatccttcaaaaaaccaccatggctcgttatcaccatacatgactattacttgatacatcccatcgctcctctcaagattcctttcccatattagtcacttttaccaaaagttgcaaggaataagtctcaacaattaagcaccctttaaaaaattcaaaaaatcatcgtttttttatgtttttatactgtctcttaagatgacatcaaaatgatgttacccttagtctagcatagaacacagggaatgtgaatataacaagaaaagataacaactctacataggtgaaattattttacttggaaaatttttttatggcaagaacaattatgttacactaaacaaaaaatctgttaggagttggcgcgttgatgtaccttaatcaaattacttttcctgatcgtgaatccgaagggtcattttttgcggggattatgcgaactgtctatgattcctattacccctatcaagtcttgtcaaagaacgccttttctcaaatcgattttgaaccaatcactatcctttacggaggcaacggttcaggaaaaaccaccgcactgaacgtccttgctgagaagatcggcgcgcaacggtccgccgcttataatcgttccaacttctttgaagattaccttgatcaatgccattgcatagttaccaacgaacctaaaatcaagcaaattttgaccagcgatgacgtattcgactatatgctcgacattcgcaatttgaatcaaggcattgatcgccgccgagaagaaatcttcgacgaatattttgaagccaaatatgcaaattttcgttttaaaggctttgaagactatgagagattaaaaaaaatcaacctcgcacgttccaatacacaatcgaaattcacacgtaaaaatctgatggataatgtccgtgaattctcaaacggagaaaacgcggcaagctttttccaagaaaaaatcgtgcctaatggactgtatcttttagacgaaccagaaaattcactgtcggcccaacgacaaattgagttagtcgcatttatcgaagacatgacccgctacgaacattgtcaatttgtcatcgctacccacagcccttttgtcctctccatcaaagaagcaaagatctacgatttggatcaaaagccggtggatgtgcgtcgctggacacagttggaaaatgttcagacctactaccgctttttccaaatgcatcaagaagcttttgaagatgaaaaaagacgtaccgatcaataagaatctcctagaatcacatagaaaacgatccgaaagatcatgcctgcaaatccatacaggcatcactgatcattcggatcgtttcaattatcactgctgcaatcgttcgaatcgtttagacatattgcaattcttttgcttcttggtaagcggcatcgatcaagccaccgccaagacattccatgccatcataaaagaccactgcttgtcctggggtgattgcccgaacgggttcatcgaagatcacttcggcacggtcattatctagcaagcggacagagacgccgacatcttgttgacgataacggaatttggctgtgcacttgaattcacttggacgatccgtgtctgtcgtaaagtggatttgacttgcttccaaccgatccgcatacaatgctggatggtggaatccttgtcccacatacaatgtgtttgttgctaaatctttgccgacaacaaaccacggttcttgtgaagtgccgccgccaccgattcccaatccttgacgttggccgatggtatagtacatcagaccatcatgttgtcctttgacttcaccatctaatgtgaccatgttgcctttttttgctggcaagtaattgcttagaaattgtttgaaattcttttcaccgataaagcaaacacctgtagaatcttttttcttagctgttgctaaaccagctcgttcagcaatggcccgtacttcagatttttccatgccgcctaaagggaacatggttttactcaattgtgcttgcgacagttggctcaagaaatacgtttggtctttgttgctatccactccgcgcagcatatgggtaaccccattttcatacgtttcgacttgagcatagtgtccagttgccacataatcagcaccaagatccatggcataatctaaaaaggccttgaatttgatttctttgttacacataacatctgggtttggtgtacgtccagctcgatattcagctaagaaatattcgaaaacgcggtcccaatattctttttcgaaattgactgaataatagggaatgccgatttgagctgctactttagccacatctttgtaatcttccgttgcagtacatacaccattttcatcggtatcgtcccaatttttcataaagatcccgacaacatcatacccttgttctttcagcaaaagtgctgttaccgacgagtccaccccgccactcattccaaccaccacacgggtgttttcgttagacatgatttttcaccatcatttcaattatagattctgaaatcatctacgatttgaaggtcgcaacttttcagtaatttgcattatacaacagattggcaaaaaattcacggagagtttcatcggtttagcttttcctgtaaaaaacttagatacttctttaaattcaaaaaaacctttcccacataaatagttcctccgacagctgctgcttaagcctaatgctagcctgctttcaagcaaaaagaaactatcataaaatcgtatgaatttcttcataaaatacagaaatgtctgttgcaaggatcagctatactcctcttagataatgacaaaaggggtaacagaacatgaacaatcacgcaacgactgaccgcagaaatagaaaaaagccaaaaaattccgtcaaaaaaagtattcttgtcttactgatcattgtcgccggttctttccttttacgacaattagtctttgaaagagtaaagcattccgactcacaagatatcgtattattgccaaagaaattttcagagcaagccaatcaagtgctgcaagaagtgctgccgaagtcccaacaagtccctttgattttgcaaagagacgaacgttgggggatgaaacgttacggctctggggaacagcaaaatacctttgccgataatggttgtgccatcgcatctttagcaatgattgattctttttggcgaaatcaggcaccagaaccagacaatattctcaactgggcaggcaaccaattttatcttgctgatcaaggaactagctggcaaatctttcctcagtttgccgaacattttggctatcaattcttagatctgggaaattctttcgaggaagcttacaagatgattcagcaaggatttcccgtcattgtctccgtacagccgggaacatttactaccacaggccatttgatggtattggctttgaatagagaagggaggattcaagtgcttgatccaaatgattcaccagataaaaaccactacaaaaaaactttctctaatgaactgcttgctgctgaaggattgaattattggtgcttttggctttgattttcaaaagcaacttacagacttgcactgttgactgagaaccatcaaaaaaaaacagactagccgattagctagcctgtttttatatttgccgtaattattgaactcgtggttcgttgttttcttggatacggctggcagttttgttgaatgcgcctttggctttacgtgtttgttttgaagcaaattctccagttgtttctgcagcactgctaactttgtcttgaacagtttctgaatctttttcgaattgttcacgagttttaacatctgctacattaacgttcacttcgataacttccaagtttgtcattttgttgacttgtgttgaaacgacttctttgatttggtcgtaaatggcagtcatgtcgctaccgtattctgctacgatatctaaatctacggctacttgttttttaccaacttcaacgttgataccggaagtaacatcatccgtattcactaattttcctgcgatatttgagaagaacccaccatcaaccgttaatagtccatctacggattctagcgcaatcccgacaatcttttgaattactttatcttcgtaagtcaattctcctttaacacctgcagtagttgttggttttacttgattttccattgtacattcctcctatatcttcataaaaattataataataaatgttaccgatcactaacgccgcggcttttgaaattgatcaaagaaaccgatctctttgaggtagaagccaaggtaacctcctagtgctgtaaaaatcagtagtagcaatgttttcaaaaagccgactgtcagaaagagaattgctagtatcagtcctaatgcagcaaagataaccgggatcttattttgttcgaaccatttgttcatcatttctcctcctaaacgacacggggttgtgtgtgatgttctcttgtttcttcagcgtctttcaagacaacttctgtttgtatatcatgagtgacaccgaatagcgtttgaagcttactgctgatctcaccaaccaatgcttcttgttgttgcgggatggctgcggtctgtttcatttctccatcgatcatgactcggactttattcttgataatcttgaccttcactgatggcgaatggataaaatcagcttgttggacattctttaaaacaaaatgttccaaggctttcttttgaatcaccaattccccggatttttgctggataaccaaacgatccgaacgctttggaaagaacaagacaacgaaaataccaatgatcgtcagcagtgcaaagccgacacatgtccaaaacaaaaacatgctcatggaagctccgacccacggatactcacgcagtggaatcaagtagaatggtaaatctaccgcttgctgattctcaatcatgccaaagaaaaagacgagcaacaataacagtaacccaatgatcatgatcactttagaaatcttacgcataggcaacctcctttactactttctatttaaagcatacacatttcttaaatatccttcaaatgataaaccttgaaaccgattattttttcattctatgaccaatgttcagcttactagaagcagaaattttgtcttgctattataactattgttaaaaagatatatgactataattctttaaccgactgttttccttgttatttctcaatgaaacgtttggtgtatttctgcttgtttggcttgaaagatcctttctaattggttttcggaaattggtcgtccaaacggccaaggttgaggaaggaatgctaattccggcgcatcgacaccgacattgatattctcagcgataggcaaactatgatgatggatatgcccatgaaggttacggctattctttgtcattcccaatagcatcggataatgactcaaataatactggtgatgatcaaattttaacaacagaccgacatccgcaaaagaaaacttcggctctccggaaattccgggatcgtgctttgctagataacgaaagagtgcgcgcgtatcatggttgcctttgataaaagcgatctttccttgcagccgtactaatagcgctaaaagctctgcaaaccccgcttcatgttcgggatggagtgcaatatctcctagatggtagaccgtatcttgtgcttgaaccacctgattccaattagcgaccatgacttcatgcatctctgagacagacgcaaacggacgtggggcaaaatcattcgaacctaatagtttttcatgaaaataatgagtatctgatgtaaaatagcgcatcttctcttcctttctcagggtaaatgttttacatatctgtcagtatacgcttagcctaaaaagaaaacagcaaacaaaagccatgattgaagtcacgatctttccttcaactgtaacaaaaaaacaaccgaacgatttcatttctgccaaagagcaagggacaagtcacaacaacatccacattgatagtgtggaaccgctaacgtagtggattagcgctagcctccacactcgctactgtggacgatccaacattgtccacggaataatttgttcatgattgtcttccagatacacttttgaaacgaaaatcttttggttgcttttcctaaataacggatcattttgttcgcgatggtttacgctttgatgaataatccgcgactaataaacccatccatcaagaaataaaatttttcttgcagcattttgtgttgcgggtctttaaagatgttgactgctttcaatccattggctgtcgtaatcgacatcttaaacgttttgatgtcctttgcgacggtgatttttaatttaaagccttctttactttgcggagttgcttccaacccgcggatcagttggaaattgccactgtttgtttcagtaaatccattgtcccgcagtgtatacttttttgcttctggtgctaattggtagcgggtctctgcacctaagacagttgttgttgtttcaaatgccatttgctttccacctcgttcgacgttttgatttccgaaaaagcttctctagaaaaaatacaagtgcttttttctagagaaagtctctttgctatccggtatttctttcttcagattatcatgaatggttgcatgagtgccagtttttttttgctttctgctctcttttcgcttatctaggagcagccccttcgattcctctaaaaacacgaaactatgggtactacttcttcgttcctaaaacggttcgagcaagtaattctgcaaaactatggacctcttcttctgtgttaccaagaccaaaactgatccgcacagattctcccacagcgggatgctctttgccatacattgcttctaaaacatgagaaggttccacgttccctgcggtacaagctgaacccgtcgagatcgcaatgccttttagatccaatttcatcaacagtagatcactagtaacaccaggaaattgcagattgatgatgtgaggcagcttgctatcaggatctccatttaaacggtagtcaacgctttgctcttccaaaacagaaaaaacttgcttagcaaattgctgatacgtctcactgtacgcacgctgtacttctggagtcagcaaggaaacagcttttgccatacctacgatccctgccaaattttctgtaccggcacggcgcttttcttcttgctcaccaccgtgtaagagagtgggtagtgacaagccgtctcgtttgtacaagaaaccaacgcctttaggtccgttgatcttatgtgctgaaatactcaacaaatcgatgccatacgcagcaggatcaatgggcagcttgccgtaagcttgtacggcgtccgtatgaaaaacagcggcgtgttcttttagcagttcgccaatttcttggatcggcaaaatattgcccgtttcattattggcgaacataattgaaacgaggatcgtatctggacgtagtgccgctgctacttgttctgataagagctgtccttttttatcgacaggtaagtaagtgatctcgaacccttgcttctccaaaaacttcatgctttcgatgactgctggatgttcgatcgtcgtagtaatgatgtgttttcctactgcttgttttgcatacgcggtgccgaggatcgctgtgttgtcgctttccgttccgccactattaaaaatgatctcgtgggctttgacacctaactgatcggcgattacttgtcgcgcttcttctagcttggtatgggcatcccgaccgtacctatggatactggaaggattgccaaaaaatgtcgtcattgtgtcattcatggctcgaatgacagccgggtgcatcggcgtcgttgctgcatgatctaaataaaccattcgtttcacctatcctttattaaagccattataacaaatctaaaccaaccgtctatccctaacgattgattttccggtagtttaaaagaatagcaaaaaacagcaagcaggttttcttctgcttgctgcgaatgatttggttcttcaatgtatttttttagaaaaagtaatcacttatgcgttctcaccaggttcagaggcgatcaccgtcagttttccctgtaatgtccattttttgattggattaggcagaatacagcttgttcccatcttcaattcataggaatgaccatcgatcacaagttgaccatatccgtcaatcacggtcatcagagtatagtctgcttgttgttccagattcaatttgccacgaacttcccattcataaacattgaaaaattcggtttccagatacgtcacgattgccgaagatccttgcttgatttcacgaatcgacagttctggtgctttagcgggcacagtcgtcacatcaacagattgttggatatgcagttctctggtcttgccttgatcgtctgtccgatcatagtcataaacccgataagtggtatctgaactttgttgtgtttccaaaatcatgatgcctttaccgattgcatggatcgttccgcttggcacatagaaaaagtcgccttttttaacaggaactttcgttaatagatcatcccaacggccgtcttcgatcattgcttttaattcttctttggtttgtgcgtggtggccataaatgatctctgccccaggttctgcatcaatgatgtaccagcattctgtcttgcctagttcaccttcatgttccatgccgtacgcatcgtctggatgcacttgcacagatagatcgtcttctgcatccaagattttgatcagcaaaggaaataccggcgcctccgaatgaccaaacaattcttggtgatcccgccataagtctgctaatgtcttccctttaaatgggccgttttcaatcacgctgacaccatgaggatgtgcactgatcgcccagtcttcaccgatcttatcatttggcagatcaaaaccgaaaacagaatgtaaacggctaccgccccaaattttttcttgaaaaacaggtttcataaataatggttccatagttgatcccctctctattgattcgctaatattatagcacgaaaaacttcaacgaacggattcttttaaataactttgtacaatttgatcccgatgtttcagatagctgtctctgtgatcctctggatgtacgcgattcgaaagaaaaataaatgctttgccatcagaaccaatcaaaaggaaggtccctgtataccctgtatgatagaggtgtacaggcgtacctttcaagtcccagccgattgagcgatgtcctgtttcagatggcgtatggtctagatatagtctttccagtatatctgctgaaagaaaagattgcgtcgctgtctgacctttcttcaacatcatttgtacaaattgagtcaaatcatcaatggttgaaaacagccctgcgtttccggcatgtttgcccaaaactcgtgctttgggatcatgggtgattcctttcagaacagtcccatcttcttggcgctgagtggctgctaccttgcttgctgccggcaaaggaggaaacccactgttggtcatttctagcggttgcagaacctcctgctggaagatctcggtgacagaacagccaaaaagttcctccaacatgaagcctagaagaatcgtgcccgtatccgtgtactggacttgcttgtcaagctgtggtccgctttggactcgaagatacgcgtgacgcagctcttcagcagacaattgatcgcggcgaggaatccaagtctggatatcggaggtgtgggttaaaagatgtcgtaacgttactttctgatcagtaaaagcaggcaaatagcggaccagagggtcatcgattgctaggactccctgttcccatagtttgagaatcaccgtcgtcgtacaaaccactttcgtcaaagaagccacatcaaataggtgttccgtcgtaagtgattctatttggggctgccgagccgcgtagcctaaacaatgagtctccatttgctctccatggatgaatcgataaacaactcccggtaagacgccctcctgttgcttttcagcgattagccgaatcgtttctggatacataccagttcctcctttcgtgcgcctctaaactgttttgattataccagtcaggccctaattgcacaaaaaaatacagaagagatttccagagaaattcttctgcatcttagtggtgaatcgcattatttatttgcaacgaaccaccattcgatcccgatggtatcgtaggtagtcagtaagtttttctttttatcaataaagaattcttgcttgctgtcagtcaaatgagcttccaaagtcaataagtcttctttatcaatagcgatcttcaaaaagtccaatcccaatacctcatgtgtcggtaaatcgatggttccgccttggccttcgatcaaaccaacttgaaaatcatcttcattcaaatgtaagaaaccatctgcttctttggtcgtcaaacctaacagctcttccaaaaagtcgcgttctttcgctacatcactgacattcagatgaatttggttgaagcgagctttgcttgataacaggactacctcacttggtgcagcttcgatcaatgcttcaagcgtttttggcaaatctgtttcttgagtgccttcgtaaaaaacttcgattcggttttcttcaggatcagccaaaacaactgcgatttgacttccttcaaaaatagattcttcaaaagtcgcagactgttctttcgcttttttacaaattgctgccagttcttctaaggaagcgacggtcaagcggatccgttgcatttttttgatttccccaaaatgatcattggcccgtggactttcttctagccagatgacttcaccttctgcacctttgaaacccaaaatggctaattcgttttcttcccgtttcaaatcaaaacctagaacatcacgataaaaagcaatctctttatcccgatcttttactcgaatcgcgattgtccgcaactttgtgctcttccccaatacaaaatctgtcattatttctccccctatatatgtatgcgtttatctatgcatttgtccttattgtactgataaaccgttatactagcaaatgaaatcctttatcattctaccattatcaagcatttttttttgacaaaaaaatagatttaacgacaaaaaaggtcactgaacttctttttttgtggttaaatctacctttattcattgaaggaaggctgtttctttcattcttctgatctgagtaccgtttttttctaatcggtcggtgatactgacagttgctactccgctcataagcgcttttttagcactgactaactttggcaacatcccgccagtgatcaccttctcattgatcaatgtttttatgtcagtcaatgagacttgctgcagccactgggagtctttcttgattcccggtacatctgtcagcagaatcaatcgttctgctctcagactgctggcaactttacaagcgacttcgtccgcattgatattcagccactggccttcggctgtgatcccaagtggggcaaggatcggtatatgattgcctttgatcagcagctgaagcaactgctgattaatagtcttagccttcccaacatagccaagtgtggcgtgattgatcatttccccttggatcaactgatcacagccagcatttaagccgattgcctgaaatccagcttgctgaaaataagtcgtgatcattggctggacttgtcccagcaaaaccatgcgagtgatctcaagagtttgcgcatccgttaccctcaagccttctttgatctgaatcggcagtgacaatttctgcagcatttccgagatataatggccgccaccatgaacaatcacgattttctttcctagagcttgccattgtgcgacttgttcaaaaaaaacgggggtcagattatctgaagcaacaccacccatcttgatgacaatgatttccatatgttcttcctcctgttggatcttgtggcgattttttgattcttacagccaatgattccgattctattcgtttgatacctccatgagataggcattacgtatgatagagtgcattgattttgacataatcatacgtaagatcacagccccaagctttcccgcgaccggccccttcttgtaaaatgacattgatttttacttctgaggctgtcaagcgttcttccatcagtgtttcatcgtagtcaaggggggatcctcctgcaaaaaccgggatcgccgctaattcgatcgccacattggcaggatcgattctttgtccgctatacccaattgcacaaaggatccggccccaattggggtcttttccatagattgctgttttcacgagtggtgaacctacgatcgttttactgatcatgcgggcagctaagtcggtgggagccccttttgtttcagcttcaatcagttttgtcgctccttcaccgtctttagcgatggctttggccaatgtcgttaagactgtctgtagcattttttgaaattgcttataagcaaatgtattttcttcaatcggcggattgcccgcttgcccatttgccagcaccaataccatgtcattggtggaggtatcgccatctactgtgatttgattaaaagtgacttccgtgagttttcgcagcaatgactgcagaagggacggtgcaatagcgacatcggtagtgacgaatgccaacattgtcgccatgtttggatgaatcatccctgagcctttggcgcaacctgccatggtgacagtgtggcccgcaatctccgtctgaatcacttgatttttttcaacaaggtctgtcgttaaaatggccttctgaaatccggtaggactgccagaatgacttaattgacgaatcccagcagcaatcgttgccatcggtagtggtcgaccaatgattcccgtagatgccaccgccacctcttctgaggccactccggcttgtgctgcagccaaagcgatcatttctctggcatctgctattccttgttctccagtacaagcattcgcattcccggaattcacgatcactccccgaagctttcctgttttcaactgttctcttgttactaggacgggggccgcttgtacttgattggttgtgaaaactgcggcggcacttgccggaacttcagagaacaaccagccaagatcggcttttctttttttcaccccacaatggatgccatctgcataaaaaccttttggtgaaacaattgtccctataatttctttcatgttacacgctccttattctgaactaatcgaattcccaagtatcgttaaggataccaagggatctgtcgtaatccagctgtttcctccagcccagcccatttattgacgttctggattgcttgtccggcagccccttttactaaattatcgatcaccgcaatgactgtcacgatgtgggtcatcggatttaagaccaacccaatgtcacaaaagttggttcctgtcacctgccgcagttctggcagctttcctaacggctgcaagcgaataaatggttgttcttgatagtcttcttgatacctctgataaatatcttccgctgttctttctggcgctacaggcacataaagggtcatcatgatccctctgttaaccggaatcaaactagtggaaaattggatggccgtcaattctggatcccattgttgaaactgctggacaatttctgggatatgctgatgctgattcaatttatatgtctgcatattttctgaaattgtcacaaaatgactggtatctgacagttttttccccgcaccagaaagcccagatttgccgtcaaaaatgggaatgcctgccaaccattttcttctgactaaaggcgcagcggctaaaattgcggcagtggcatagcagcctggattggccattaaatttccgtgggacgtctgaaactctggcaatgcatatgttgcagcatgcaataaacgatccgcagctggcgtctgctggtaccattgctgataaacacctgcttctttcaaacgcagatctccggataaatccatcacaggaaagtcttgttcgacaaatggcgagaccaaatctttgctaataccagccggtgtcgcaaaaaagaccaattcattttcttgcataatctgcagcggatcaaacgggtaaatcctttggttgaccagttgctgcagatggggataaacattgactgaattttcttggactgaatgactatgtaacgttcctatctccaagacaggatgcaagtggatcaaacgaaccaattccaatcctgtatagccggtaaacccgacgattgctgctttcacttactacacccctttttcacttgttctcaaattctttttcaacaacctttcaacaaccaaagcagctcttctttcttcattctcacctttcagtggtttcttctttcgttcctaaaacatgacgtagaacagcgagtccttcagccatttctgcttccgttatggtcaatgctggcagcagacgcaggacattcgttccagctttcaacaccagtaaccctgcttgacgcaattctgtcatcgcctgttggagagcagtgctatccttcaactctaagccaatcattaggccctgccctcgaatagccacgatctgtgccagatccgttaagcctgccataagctgctgatgtctggcagcaacatttactaacacaggggaatcggttaggaccgtacatacggcatttgctgcagccatcgctaacaaattaccaccaaaagttgaaccgtgacttccagggccaaacccctgctgtaaatcagtttttcctagcatggcaccaaccggcagcccattgcccaacccttttgctaatgtaaaaatatcaggttcgatcccatattgctcaaaagcataaaaactccccgtgcgtcccattcctgtttgaatttcgtctatgatcagcagtgcacctgcttcttgacataacgcggccaccttttggacccattctttttcagctgggatcacgccgccttctccttggaccagttccatcatcaccgcagctgtttcctcatccaacgctgcttgcagcggggaaaattcattgaagggcaaatactcaaaatctggtacgagcggaccaaaatcctgatggatgctttcttgagccgttgctgtcatggcaccaaatgttcgtccgtgaaacgagccctcaaaagttaaaatctttgtccgacccgttgcttttcgagctagttttaaggctgcttcatttgcttcagccccactattgcaaaaataggcaagatatggaccttttgttagtttttgcgcgactgtctcttgtaacgaattggtgtagaggttgggcgcatgccataatttgtccgcttgctgcagcattgcctgctggatttcaggctgcccatagccaaggttgacgaccccaataccgcttgtaaaatctaaatatctccgaccttgagtatctgttacatagctgccctttcctgcagcaatctctaatggcaaacgtgtataattgggaaacaactgactcatccatcaacgacctcctatgaatatttatgtattaatatacatttttagcaaataaattgcaatatttatttattttataacgaaaatattcattccaacaaaaaaaaagagaagcttaacgcttctcttcattcttgtttatattcacaaaaatcgattgaataaaatcgttgtcttcttgtatcaggccgcatcatctgaaaattggctgttatacaagtccgcataaaaaccattcttagccatcaatgtgtcatggtttccggtttcgacaatcgaaccatgattcatcacaataatattgtcggcatcccgaatggtagataagcggtgagcaacgacaaaacttgtccgattttccaacaatttgttcatggctttttggatgagaatctcggtccgagtatccacactagatgttgcttcatccaagatcaacacatctggatcagctaagaaggcacgcgcgatcgtaatcaattgtcgttgtccttgagagatattgctagcttcttcattgaggaccgtatcatatccgtccggcagcttgcgaacaaagtcatccacgtgagcagctttagcggcttcgattacttgttctttcgtcgctttgtcattgccgtaatggatattgtcatagattgatcctgtaaatagccatgtatcttgtagaaccattgatatgttgctacgaagctcatcacgggtcagatctcttgtgtcccgaccgtcgtagcgaatactaccgccggaaacatcatagaatcgttccaacagattaatcaatgtcgttttaccggcaccggtaggtccaacgatagctaccatttccccagctttgacgtctagattaaaatcggtcatcaataagttgtctggtgtataaccgaattgaacatggtcaaaacgaactttatagtcgctttcttccacgggtaatccagaaggttcatctgacatttcttcttcatccaagacctcaaagacccgttctgctgatgcaacagttgattggatcgtattcaataaactagcaatttgagtgatcggttgtgagaattggttcgtgtattgcaagaatgcttgcacatcccccaaagtcatgttcccattcgctactttgatcccacccagaactgcgacaaagacatagcccaagttcttgatgaagttcatcaatggcataatgattgcggaaatgaattgtgctttccaaccagcactatacagacgatcgttttcttcttcaaatactttttgatcagccgcttcatggttaaaggttttgacaacggtatggccgccataggtttcttcaacctgattattcagtaatcccaagctcttttgttgcgcagcaaagaatttttgtgattttggtgcgacgatcattacgacgatcaagcttagcggcaccgttgctaatgcaaccaatgtcaactgccagctaatcgttagcatcatccacaacactccgactaaagtaacaaaactggtaataaattgggtcaagttttgttggagggtgctggcgatattatccatatcattgattgcccgtgacatgatatctccgtttgaatgggtatcatagtaagaaatcggcaagcgattcattttttcttctaaatcacgacgcagttcatagacggtccgttgtgatacacgggtcatgatgaattgttgcaagaaattgaaaatagcagaaataacatacataccgatagcgatcataatgatttgtcctactttatcaaaatcgatcggaaattcggtgacagtttttccagctttcatttgctctgcgccaatcataacacctttaaagatttcggttgttgcttcccctaagatctttggtgtttgaatctggaagattacggcggcaatcgctaaaacaaataccgaaatgattgcgatagaacgtttcgacatataaccgaaaagtcgttttaccgttccccagaaattttttgcttttggtcctttcgctccaatgttgcgccctggaccgccacccatcggtccaccgccgcgaggtgcttggtttttccgttcactcatgccacatcctcctctctcaattgagatgatacgatttcttgatacgtttggtttgaggccatcaattcttcatgggttcctttacccaccaattgaccttcgtcaaggacaaggatcgtgtctgcatccattactgtacttacccgttgtgcgactacaaccataatgctgttcttcatgtcttttttcaatgccgctcgcagctgtgcatctgtcttaaagtccagcgctgagaaagaatcatcaaacacatacacatcggcttgtttcactaatgcccgagcgatcgctaaccgttgacgttggccgccggagaaatttccgccgccttgttctacatgactgtctaagccttcgctcaattctgaaacaaactctttggcttgtgcgatttccagtgctttccagatttcttcatctgtcgcatctggtctaccgtatttcatgttttctcgaatcgtaccagtaaataaaaccgctttttgtgggacgaaaccaactgagtcccgcaaattatgctgtgttacttcagcgatattcactccattgatgcggatcgctcctgattcgatatcatagagccgaggcagcaaattgaccaatgtcgtcttcccagaacccgtaccaccaatgattgccacaaaatcacccgattttgcttgaaaatcaatgtcttgcagtgctaatttttctgcaccgtggtaacgatagttgacgtgatcaaaagcaagtgtggcttgatcaccttttaattgaatcatcttaggtgctttatcatcaacgatctcttcttcttcgtctaatacttcattgatccgatctgcagaggcttgtgctcttgggaccatcacaaagatcattgacagcatcataaaactgatcaagatttgcatggcatacgtcatgaatgcaatcagattcccaacttctaatgtcatttcagcaatataatgtccaccaaaccaagtgatggcaatattggtcccactcataatcaatgtcatcaaaggcatcataagtgccacgatagtatttactttgatggccgtgtgggtatagtctttattggcttcatcaaagcgattggcttcatacccggtcttatcgaaagctcgaatgacccgcactccagtcaatccttcacggaagaccaaattcagacggtcagtttttttctgcatgcttttgaaaagtggcacagcaaaatacatgattccaccaaccaaaacgatcataattggaataacgactaaaaagattttggttaactgagcgtctttttgataggccaagaagcttgctccgatcaaagtgattggtgcattgatcatcatccgcaagaacatttgtgccaccatttgaatttggttgacgtcattagtcgtacgagtgatcaaagaggcagttccgaatttatcaaaagaacgtgcggagaaattttctactttttcataaatatctgtccgtaatttttgccccaatttttgtgattctctagtagcaaagaatgtattgcctaatgcagccagaatactgatcagtgaaaaaccgatcattaaaaagccggtacgccagatataatcaatgtctccagttgcaacgccattattaatgatattcgacgttaatgtcggtaaatagagatctgctattacttgtacaaccataaaggcaacggccatcagtgccgaaacgagtgaaactcgtttaatcaactttgtcattcttttcccctctttctttttgtgcgccatctcttagccagctgattttgttattgaaatcagtcgttgctagcgaaggatcataggcatgattttctgctaactctcggtatgcttcagcaatcgtagaaaaaacggtgtgcatcaacagttggacgagcattttcaattcatgatcatccttgacccgtaataagtctttgtcgatctcagcaaaaaattcttcttcccacttctgtctcgcttcttgatgctctttgtgagagccgtagagtggttttttgtggatatccggcatcacttttcgcaaagaacgataatccatactcatgaagagattgcgataaaattttgcattttttccttctaacacttcttcgatcatccgagaaaaataccattcaaagccagcaaacagatcgcccttttcgtgttgaatggaacgaatcaaatcccgctgactgttttttttcaacgtatgaaaatagtagtagtataagtcttccttattttcaaaatactgataaaaacttccccgagggatttctgcgtctttgatgatattggcaatcgaagcatccttcaatgggacccgagaaaattctttcttagcagcgcttaaaatgcgtttttgcttatctaatggcaaatggaaaaacgtatccgttggcatcgtcatctctcctttcagttcaaatgataaatgacaacaattattatgacaggttgtcatatgacactgtgtcattatacacccctcatgagagaatgcaagtaaaaaagtttgaatattttatgaaagtcattttctttataaaaaggaaattcgcttagtgatttcatttcattgaaaatagattcattgtctttttctgaaaacaaaaaaagcagcggctattccttaagaaaggaagccactgcacaacagccgtttttcgattttaaataacatctattttttctttctaacccacaggacacagcctactccgactaacaaaacgactccaacgactggcaaaaaccaattgacggtctctcccgtttttggcaatgctcgactgtccgaagtagcactagctacttctgttttgctagttgttgtttgttccgacgaagtgttggcagcagatgtatcagaagattcggtattccccgttacttcagaagctgctgggagataatgaccttgattcacagcgtaaatgatccagccaatccgacctggaaacaatgtttctgaaccactggtagctacttcttcatctaagtgtgacaaaatcgatgtcaaccattcatctgaaattggctgttccggggaaatataaacaccatttgttgggtaaacaacttgcagatatgtttttaagcgatccagttctggaatcaacgctgcaaaagaagagtagctgcttggatcaaaggctagctgcggttcaatcttctcccaagataagagatgatcgataaaaagagcgcgaacgatccgagcaaaatagccgatatccattcccatcacatcttggctatatcgtaatgctagtgtctctgcatcttttaattgctgatcggtcaattgatccaactcatcttgcgtgaaagctgtcacacttccatcagtgatgcctctagtaaaagcagagcgcaaatcactttgttctgtaatggtttctgactcaggacttgcttgaacgcctgtttgagcgacaatggcttctaccacatcctcgggctgtgtcgtcacggattcactactttgtgcagtgtcagcggttgattccatttcagtattcgaaaccgtcgcttctgtcgaaatgatttcttcagttgattgcgtagattgaatcgtttctgatgattccgttgtttcctctgcaatggcagtaattggtaaaaataatagacagctcatgaaccagatactctttttcattcctttacctcctcaggattctcaggatttctttgtaacacgaatgtaacacaatagtaaattattcgcaatgtaaaaaggcacttccttaagaaatttaaaagatattcaatgtcttccgatgcactccgcttcttccctaacaaaaaatcccgaaccacttcagatgattcacattaacagaagcattaacgagatcatcattcagcagtacgggacgaagcgttcttaatcaccgaatgacacatgggtagaaaaaattgtaccattcgaatctagctgttttttaactatttgacttgtacagtcatcacaggactagcacttgtgactgttcctttagcagtcatggtttctgagataacttgttccatattggtgagtaccacaagcatatcagttgctttattgctagctgccaattctgccagatcaacttcagcaacttgtgtagcggcagtcacttgttgcccttcttggacgaggatattgaaaggcttgccttgtagctcaacggtatcgacacccatatgcagcagaatctcaagtccatttggtgtcgtgattccaatggcatgtttggttgggaagatcgttgttacagttcctgcagctggtgcatagatttttccatttgcaggagctacataatatccgtcacccatcattttttgagaaaaaacaggatcctttgactctgtaatcgcatgaacggttccttcagcaactgcatatagttcaatggtttcaggtgctgcagacgttgctggtgttgtagccgtcgttgaagtagccgccggtacttcttcatcaacagcattgacagcagctaaacggtctttaggaatcccaaagaagtaagtagccacaaagccacctgcatatcctgctaataaaccaaagacatagcctaaccaatgaccgttcgcaatcaacggaatcaaagctactccagaaggtccaatggcggtagcgccgatattcgacaatgcgccgataaccgccccaccgattccgcctccgatacatgccgtaataaatggtcggcctaatggcagtgttacaccgtagatcaatggttctccaatacctaaaatccctactggcaaagcgcctttgatcatttcagaaagttctttatcttttcgcagacgaatccacagggctaatgccgcccctacttgaccagcgccagccattgctaagattggcaataactgtgtgctgccagttgcttcgatcatttgaatgtggatcggtgtcaagatttgatgtagaccaaacatgaccattggcaagaaggttgctccgagaacaaaacctgagaatgcgccgccgacatttaatacccaattgattgagccaaccaaactgtctgaaataaacccagctaatggcatgatcaaaaagatctctgccaaaccgatcgctaacaaacacaaagttggggtaacgatgatatcaatggcttcaggaatcactcggtgcaaaacagtttccagtttagccagcaaccagactgcaaagatcacaccgatgatccctccttgtccaactgccagaggatctcctgtaaagaggttggtgattggggcttctggattcattccagtcaataagacgaccgacccaatgacaccacctagcgttgggttcgctttaaatacttgagctgcattgacacctgtgaagatcactaaataagaaaacatcccgttttttaagatatttaaaatcatgacataataattccacgtgtcgccatcgatttttcctgcagtgatcaagttcgtcataacagaagcaataccagcaacgagaccagcaccgacaaacgctgggatcattgggacaaaaatattcgaaatatctttcaataatgacttgattggtgattgtttttgtttcgctttttgagcagctttcatttctgctgctttcgcattcacagcctcttttccactggtggctgccacaggaatttcttgccctagatcaacacccgcttgtgccgccatggcatttgctactttattgacttttccaggaccgatgatcacttgcagttgttcatcgtccactactcctaagactccgggaatgttttgtaacccttgcttgctgaccttgttgtgatctcgaaccgtcatccgtactcgagtcatacaatgagtgacagaggcaacattctcgataccgcctgattcttgaaatattttttctgctagttgtgtaactgtcagttcttcttttgccattgattttttcctcctatccttctaacgttcctttaacgaacccttctgattgtaccagctttgcagcagcttcttctttttcactattggtaagcagcataacgatcgctaacttcacattttgatcggctttttcaaagtagtctgccgccgtttcataatctgcttcggtggcttgcatgatgattctcttggcccgttcaacgagtttgtcgttcgttggtttaacatcgaccattaaattattgtacacttttccgatgcctaccatcgaaatcgtggaaatcatgttcaaaatcaatttttgagcagtccctgatttcaatcgggtagaacctgtcagaaattctggtccgcaatccacttcgatcgggaagctggcatgttttgaaatttctgcttgtttgttgcaggcgatcgttcctgtggtagccccgatttcatttgcatagtctagtgctccaatgacataaggtgtgcggccgctggctgcgatcccaatgaccatatcattttccgtcagcttcaggtcaatcaagtcttgacgccctaattcaacagaatcttctgccccctcaactgctacagtcattgcttcttcaccgccagcaatcaaaccgatcaccatatccggtgagaccccaaaagtagggacacattcagcggcatctaaaactcctagtcgtccgctggtaccagcaccgagatagatcaatcgtcccccttttttgaaagattgaatcgtttgctgaattactttttcaatgcttggcaattccttttcaacggattgagcaactttctggtcttcggcattcattttctgacaagcctctgccacagtcatttcatccaagccaaatgttgcttgatttcgtctttcagtcgttaagttttctaaattaatcattgtcatttctctcatctctttctattttgaatcgcattcctgctttgatttgttggagcaaggggagatcttcttcaatcacttgcgcagcgacattgactttgtcatctgcgggcaggattcgcttacaaatttggatttcccccatatagcgcaagtaatcttgattatcgatagtcacagctccgacaacccgtttttgagcagtttctggggaaatcaatgggacttcagcaaatcgggcatttgcactgcgaatcacatctcttgcctcatcttgccggctctcatgctctcctaaaatatgttgataataggcagaaccaatatcctttgtgcgaagaaggacggtctgatcggctagataagaactgaattgcttcaaagaagcaggggtcacgataccatcaccaatgtagacagcatcaacggcacaatccctcaacaactccagtgctgctgcgaaggggctcatgctgcgatgcgcttccagtgtcggcaatccttggtaaagaggacctcttttattcgcatccccagcaacaaaggcctgtacaagaaaaccttgttgtttcaaccactgatttttggcctgaaaccattctttgtctaatcccgtctccggacgcggatagtaattgtgccacgcctctagattagaaaaatctgcctgataggtgttcaactcgttaatatctttttcagtcaatgtactcgcatttaaactaatagttattttacgagataattgagcaatggtctgattgtcgatcgcgtaatccattcgcagcccagtgactccccgatccgtcagttcatttaactctttataggaaaatcctgctttagccaatgcctctcctgaaatatctaccattaatgacaaccgattcttttttgctatttcaccaagtgttgtcaatcgttggcgataactggcggcatcatcttctggtatatgcatggatgtaaaaatcccagaaaaaccttgaagcgccatttcttcgatggcatcgatgtctgtggtagtcaaatcggcattcataaatactgaaaacccaaacattgttgattcctccttgctggtaccgttttctacaaaatgattatacaacggcctgtttgtttttgcaactatatttcgtaatatataattataaaaagaaatataatttcataacggtgtattttttaagaaaaagttgtcccttaaactttctaatgcggttcggccattagttgtggtacactttataaggagtcaacgagcgcgtaatttttacatagtaggaggaatcacatcatcaatgattacaatggatgatattattcgcgaaggcaacccaactttgcgggaagtagcaaaagaagtcccctttccattaagtgaagcggacattcaattagggaaagacatgatggagtttctagaaaatagccaagacccagtgaaagccgaagaattgaatttacgaggcggagtcggtttagcagcacctcaactagatatttctaaaagaatcactgctgttttagttcctagtagcgatcctgaaaatccagaacctgaatttaaagatgtgttgtacaatcctaaaatcttaagccactccgtacaagaggcatgtttaggtgaaggcgaaggctgtctgtctgtagaccgggaagtaccaggctatgtcgtacgtcacgcccgaatcacgatcagctattatgacatgcaaggcaagaagcaaaaagttcgtttgaagaactatgcagctatcgtcgtgcaacatgaaatcgaccatttgaatggtgtcatgttctatgatcacatcaatgaaaaaaatcctttctcattaaaagaaggaattttagtgatcgattaacgattagcaaacaagagcgcactcccaagtgggaatgcgctcttgtttactttagtcgtcattcattaggattaatttccctttgccaagctggcttgatggtccgctttgatttgagacaacaattctggcttttgataaagatctaatgcagtcaatgcgagtaattccgctgcgatcgcaatcgagttcagtcctttggtactacgagcagccgctttaaattcctcggagtgaccagcaatgtattcatccgaaattgagacagttggctggatcgtggggatcacttggctgacgtttcctacatctgaagagcctaaacttgcttttgtttccacatcgatctctgcttggggaacgccaacttcctgagtatgggcaaagaatagttcatcaaaacttggtgttacgatcacatcgtcgactgaattctggaagagtccaaattcataagtcgttcctgttgctaaagctgctcctttaacgatattctccactttctcatagacttcatctagtgtcgcccgattggctgctcgtaaataaaaacgtccagctgcatattctggaacaacattcgctgccacaccaccatcagtgatcacgccatgaatgttgacatctttcggcaaatgaagacgcaacccattgatcccattaaaaacttggatcaatgcctctaacgcattaatgcctttctctggtgccgctgccgcatgggatgcccgaccataaaatttgatatcgacaggatcattagccaaagatgcggtggttttgccatagcgataagctggatgcacgcacaatgcagcatcgacatcctcaaaaaatccttcacgcacaaaactgccctttgctgagccattttcgcccccctcttcaccaggagtaccataaacgcggatttctcctcctagttcatctacataaggttgcaacgcactagcagccaatacagaataagttccaaagagattgtgcccacaggcatgaccgatgccgggcagcgcatcatattctgccaaaaaagctaatgttggtccaggtttgccgctttgataacgggcatcgaaccctgtacgatgaccagccacttctttttccacggtgaatccttctttttctaattgggcaatcagcgcatctgcagaataaaattcatagttgctgacttctggatgatcatgaatatccaaagctagttcttggtattccggtaagcgttgtgcgataaattctttaatagaagtttttacagttgttgtcatatgattttctctccctttaatatggataaataagtatgaatagtcagtggtctcacagctcctgcctcagaaaggtaggcattcttgctatactcttctttacttcgcgccaaatgtctcccaggctggaacgctagaacctttcgatgtttcttcgataactttctttgtttcgtccgtttgataagcagcaacaactttttgatacacttcgttgtcttgatcttctttacgcgcagcaatgatgttcacgtatgggcgagccgtttcatctacaggctctaagaagatcgcatcttctgtcggaacaaagccagcatccacagccattccgctattgattactgaaatatcaacatctgataatgcgcgggcagtttgggcagcatctaactcagagattttcaacttttgattgttttcagtgatatccgaaacggtcggcgtctggcctgctgcttcatcaactttgatcaagccagcgctttgtagtaacaacaacgcacggccgccattggtgacgtcatttggaattgctactgtcgcgccttctttcaattccttgatatctttcaccttgtctgaataaatccctagcggcgcattgactgtattgccgatagaaacaagatccgttccaaactctttattgtaattgtctaaaaagaactggtgttgaaaagaatttatatcgatagaaccatctgccaacgccgcattcggttgattataatcagaaaattgaacatattctaagttgataccttcatctttcaaacgatctttgacatcatcccaaacatccgtgtcggcaccgatcactccaagtttgacggttacttctttctcttttgttccagcattgctattgctgcacccagtaataaataataatgccgcacctaccacgattgctttaagtaattttttcattttcttcctccaatagtttctacttaattttatttgttttttttgtcctttttagtggctgacttttttaaccaacagattgctgacaaattgactaaaaaagaccaaaattaaaatgatcagtgtcgccatgatggtgacgtcgttttggaaacgattatagccgcgggtgatcgccaagtttcctaaaccgccagcaccaactgcaccagccattgcggtcagtccaatcacattgatgatcgttaaagcagagacgcgaatgatcccagccaacccttcgggtaaatagacccgcacaataattcccaatggactggttcccattgcttctgccgcttcaataaccccaggatcaacttctaatagggcaatttcgatttgacgagcaaagaaaggaatgatccctgcaatcaatggaaccaaagcagctgtttccccaatcgttgttcctacgatcaaacgagtcgtcgttcctaacaaagccaataggataataaaaggaatggaacgtacgatgttgatgattttatccaaaagttcaaataatccgcggctttccaaaatacctcctggtcgggtcacgacaagaacaatgcccaaaatgattcctaaaatccctgcaatcagtgctgtccaaaaggtcatgtataatgtttggatcgttgcttctacaaattcatcagagatagcaacgacattgggaaaataccgttcaaaaaaagtgctcatctaaaatcctccttcaatcacgttattcaatggttccgcgtgattttgcttaatgatattcgtgtaaacaccttgatccgcgagaaaatctaatgctcgtttacgctgcccatattcccctgataaactaacgatcaaactaccgatgggaacatcttgcagaatctctacgtttccgtagaggatattcgtcgtaacttgataacgactaaacaattgtgcgatcaatggttcattggtctgatccccaacataagacagttccaccagccattcgttggcagccaatgaggagaatttcgcactgccgagaatcgtttccagcgcttgatcaatatgagtagcagtccgaataaagtcttttgtcagcggttttgccggctggctaaaaatttgaacactctttccttgttcaatgatctcgccattttccattacagcgactttattacagatttctttcaccacttgcatctcatgagtgataatgacgatcgtcaaccctaatttacgattgagttttttcaataatgcaagtatctgtaatgttgtcttaggatcaagtgcgctagtcgcctcatcgcagagcaagatctctgggtcgttggctaatgctcgtgcgatggcgactcgctgcttttgtccccctgaaagttgactaggaaacgaccttgccttttcttccagtccaaccaaggacagcaattctgtcactttttgacgacgttcctgtttggagattcctgcatatttcaaggaaaaatccacgttgtcaaagacattccggctatccatcaaattgaaatgctgaaagatcattccgatcgttttccttttttctcttaatgctttagccggtaatgcggtcaattcagtctgattgactacgacactccctgacgttggccgctgcaataaattgattacgcgtaccagggtacttttacccgcgccggaatagccgacgatcccataaacatcgcctttatctacttctagtgacacatttttgaccgcttggatcgtctccttgtttggttgtgtaaatgtcaccgatacatcctttaatgaaatcatttttttcctccttattatcgccgattgattaactagttgatttttggggatgatcaactacgcttcctccggtcaactactactgctcatcatctgctcgtctactctatgcttcgcctacagttgcttctaagctgacgctaagaagaacttgcatggtctttgaccaatcgcagtgattcggggtgaggttactacgctccctccggtcgcctagtactgttcatcatctgctcgggtctttgaccaatcgcagtgattcacagcaaaaaggcgtcctcaagcaagccagttatggcttgcttgaggacgcctttttgcgtgttaccacctcagtttaagctatattcacatatagctcctcttcgagtacgatcatactctagcaagataacggatgctgccgtcgccgccttgcatcattgctcgggacgaatcactccttggccattttccaaaattcgtttcctgcttcttttcagctaccgaagctctctgtttaggaacattccttttgtacttaccaattcatcgtgttgactctatttttttatgccgctttttattttcaaagatcgatgaaaacaaaaaaagtccttttaccagcatctgctgataaaaggacgatcactcgtgttaccaccttttgttcagaaggtttcccttccctcaacccaacgtctatcaagaaaattccatcaagagattggtgctccttttaacggtagagcagattccgtgattgcctacttatcgacaatcaatcctccaaggccatttttcaacgtttcagacttaactctttccaccaaccagagtctctctttaaagtatctacgattactttccttatcaacggatagttattcttgttgaaatgtactttaccggaaaaaggataccttgtcaatcagaaaactattttttttcagaattttttggcaatgctagaatctgggcatagcgatcttgccagatccgctcataccaatgaatgatttcagcagctgaccagccttcgaatgcataagtagtcgttgcttgctgatacaacacattctgataccctaatccatgggcaaatttgatcgtgccatccatacaaaattcagtttgcgcaccgatccattcgatgctgcgaacatggtgctttgtcaacaaggactgtaaggaggtattgaaaaagctattcgcatgagtcttgcgcaaaaacaagtcggttgcttgcacagccaaatctggatgtaagagccattcatctgtttggtagccgagttcttcttcctcatgctgcacaaataaaacggggcgttgtgcatgacggtaagtttggatccgctggttggcaaacaacagcagcgaatcgagatgatccagtttggtgccattgtttgaacacacgcctttttgtaaatcaacgatgatcagaatatcttgcatccacttctcctttagttttggtataagattcctttatcagccaacaattgctttgcttgctctaactctgctgcttcttggtagcgtaacgtatggagatggatcccattggtcaaatcagaaagcaggcgggcttgtgaatgctggtatttccgcataaagtctgcgacatcttgttccgttttgatccgcagattccctgttaattccccataaatctcatgctcaacgatcacatcaatcacttcgattccgcaagagacaaatgtcaacaattcttcttctgtttgttccggacggtgttgcacagcaagtttgctgacatgacctgtctcacttgcagcttctaagcggtaaccgcgagcggtagccacgatagcctctcctgctgctcgcaacaaggcaatgtcaccaacgatgatttggcggctgacacctaacttacccgctaatttactagcactgatcggtttctcggcggtctgcaactgcttgatgattgcttcccgtcgtgttgctccatccatcattatccctccaattgattcttttgataagtgcgagaatgttccatgatcgactcaaaggttacgacaatcgtttcttcgaaggctttattggaaacggactggcgaacattgttcaaaacagcttcttcccgagattcatccagaactgctgtctgttcctgttttttccattggacgatttcactgactgctgtcatgcgtttttctaataattctgtcagttctcgatcaatcgcatcgatcgtctcccgttgatgatcgatagcagcaacgacttctgtcgtgcttttagttgcgggagcgacatcttttgcgatctcttcgatggtttcaccagattcaatggttttgatgatccgagctggatttccagcgatcaccacgttatcagggaacgatttagtcacgacacttcccgcaccaacgaccacgttatcgcctaagcgaacacctggaaggataactgcaccgccaccgatccaagcattgtcgccaactgtaattggtgcgccatactcaaggccactattacgcttgactggatgcaatggatgagaagctgtaaagagacgaacatttggtgctagcatacagttatcaccaaaggtaatgggacaaacatctaaaaagatacaatcataattggcatagaaattttttccaactgaaatattatagccgtaatcaaagcggacattcggttcgatatagatacggccagccacttgaccaaatgtctcttttagcagttgttctttgatcatcggttcggattcccgattgatcaagtgcatttgttctctggcaaatttgcgatcggcaactaattctggatctggtgaaaaatacaattcaccagcaatcattttttctttttctgtacgttctgtcataatgtgcctccatactccttttcaattttagtgtgagagttttgcaaaaactgtttccccacttgctaaaacttgaggagtcgtattttgttcaagcattgtttggttgatgatcaagcaattctggctattttgatactgcaacaaaccagcaaaaggatagacttgtaatgaggtgcctaccacgaccactagctgtgcattggccacagcgttgatagctgcagtaattgtttcttcgctgaaaccttcttcatacaagacgatcgctggacgaatctgtccaccgcaatcggcatgatgccagtctgtcaaataggtttgccaaggaacttctgcaccgcattgacggcagtaacagcggtaaagggttccgtggaaatcaatacgctgctgactccccgcctgttgatggaggccatcaatgttttgcgagactacccaaacgttccgttcttgagcgaactctgccatcgtctgatggatcacattgggctttgcttcaggatggtagagatgtttgacaaattgataaaatttatccggctctctgaccatacaagtatgactcaacagatattctggcgcttcaatgccatgataaatccctttcaaagagcggtaatccggaataccggaaggggttgaaacgcccgctcctgtcaaaaaagtgatagactcggcagcttgaatcttttcgacagctgtttcaatcgatactaacattttgctgaactccttccgtgattgttctactttttaatagtatacctaatttccccattttttataaccatcatccgcgatttttcacaaaccttcccttgaaaaagcctcaacaggaaggaaatcttcacttggaattttcagctcatttcattgattctttcatgacattctacaaaaaacgtggtaaactattcacgaatcaaagtgaggtgaaatacattggtagcatctattatttattgggcaatgatcatcatcagtttcggctggttggcagttagcttatacttctctattttctatttatctcgtaaagaaaatggaaatctatgggcgtttgctttcttaaatgtcatcacagcaatcattcaagcactcgttctattggtttatcgtacattaggtcaagactggggcgttacacaatactcaagtctcatttatttagctctaggcttattactaggtctgacagttattcaagctgtcttaggccgcgaaccaaaagccaaagttgcttaaagtagccgaaagtaaagaaaagcagttcccttttccaaagaaaagagactgctttttttgttgaaaagaattgacaaatccacctttttcttctacactcgattaagtatcataatcaaatacgagtatcctttaacatttaggtagaggtcgcgaggttcattaatcctgctgagtgaagcaacacgtcaaaagcagagctagggaacatcgccgaaacaaactgattcttgcttgaattattttgttgggacgcaagtgaacaacttgcgtactgtcttagcttggctaagttgcgctatgttttgtgaaaggtttgtcgacgaaattgtcaacagccgttttccaatcatggagtacggctgtttttttgttacctttgcctgtctgtagtgccactcgtgaaaggaaagagaaaatgaagaaaatgaattggttttgggcatttttcgccctctgtttcacacttgtcaatgtatcgatgactgctcatgcagatgatcaaactccagctgatcagtttcgagtggggatggaagcgggttatgcccctttcaactggacccaaaccaccgatgcccatggagcggtacctatttctggcgagaaagggtctgcctatgctggcggttatgacgttcaaatcgcgaagaaaatcgctgatggtcttggcaaagaattagtgatcgtcaaaacacaatgggatggcctggcacctgcattacaatcagggaccattgatgcggtaatcgctgggatgtcccctacagccgaacgacgggaacaaatcgattttaccgatccttactacgaatcgaacttagtcgttgtcgttcaaaaagatggtaaattcgcaaatgcgaaaagtttagctgatttgacaggtgcaaaaatcaccgcccaattaaatacattccattacacagtgatcgatcaaattccagaagtacaaaaagaacaagccatgaaagatttttcttccatgcgcgtcgcgttggcttcaggcatcattgacgggtacgtcagcgaacgtcctgaaggcgtcactgctacaggggcaaatcctgatctgaagatgatcgaatttgccgaaggtcaaggttttgaaaccaacccagaggatgtccaagttgccgttggtatgcgcaaaggtgaccccgatgtccaaaaggtcaacgagattctagcgacgatccctcaaagtgaacgcacgaaactcatggatgcggctatcgaagagcagcctgcggacaccagcggagattcagcgaatcaaggtctgctggccgatttcaaaaaaatcatcgatgactatggttctctatttttacgaggggcaggattgacgcttttcattgcgatcgtttctactgtcgtcggattattgattggtctattagtcggtgtctttcggacgctgccagctgctgaaaatcctgtaagtcgctttttccaaaaattgatcaatgcattattgacgatctatattgaagttttccgtggcacaccaatgatggtacaagctatggtcattttttatgggactgctctagcatttggtgtttccatgaatcgtacgattgcggcattattgatcgtttctatcaatacaggagcctatatgtctgaaatcgtccgtggcgggatctttgcagtggatgatggtcaatttgaagcagcacaagcaattggaatgactcactggcaaacgatgttcaaagttgtcttgccacaagttatgcgaaatatcttaccagcaacaggtaacgaaatcatcatcaatatcaaagatactgccgtgttgagcgtaatcagtgtcgccgatcttttcttccaaggaacatcggctgccggaacaaattatcaatacttccaaacatttgcgatcatcggtgcaatctatctcgttttgacaatctctgcgactcaaattttacgttttgttgaacgcaaaatggatggtcctagttcttatgtcaaactagaagatatcaacccagaataaggaggaagacagatgtcagcaattatcgaaatcgatcatttaaagaaaagttttggcgacaatgtcgttttgaaagacattagtctttcggtcaataaaggtgaagtcgtaacgattatcggctcctccggttcagggaaatccacactgcttcggtgtatcaatcttttagaaaagccaaccagtggaaaaatcatttatatgggcgaaaatgtcctagaaaaaggatacagcttaccaaactatcggactcatttagggatggtgttccagtccttcaacctttttaataacatggatgttctggaaaattgtgtcacgggccaagtcactgttctaaaaagaaatcgcgccgaagcagaaaaaattgctcgggagaatttggaaaaagtcggcatgagccgctacgtcaaagcaaaaccggctcaattatctggtggacaaaagcaacgggtagccattgcccgggcattgtcaatggatcctgatgtgatgttattcgatgaaccaacttcagctcttgatccagagatggtcggagaagttttgaaaacgatgaatgcgttagctcatactgggctgactatggtcatcgtgacccatgagatgggctttgctaaagaagtctctgaccgagtgatcttcatggacaaaggtgtgatcgctgaagaaggcacaccagaagaaatctttatccatccaaaagaacagcggacgaaagaatttctatcgcgggtacttaattgatcctgtgctgaactagggtacaagttgcagacaaaatgatttagacgaacagtcagtgccttcctgtcttacaagagggcattgcttgtccttaccgaatcatcttcttgtcgcttgttccctggtttctttttttggccttggtcaactaagagttgctatttgatcatttttttgttattttttttaaaactagagaactataggagtaagttgatatgaagaaaaagttacgtattcaagactatttgtatgttggttctatgttgtttggtctattttttggtgcgggaaatttgattttcccagtgcatatgggacaagaagctggtagtaatgtagcccttgccaatttaggtttcttagtgaccggaattgggttaccattcttaggcgttatcgcatttggtctttcccaaagtacgggtgtcttcgaattagcttcacggatcaaccgccgttatgccattattttcactgtgttgctttatttagtgattggtcctttttttgcactccctcggttagccacaacttcctttgagatcggacttgtaccctttgtttcccaagatctccaagcacccttgttggccgtattttcactattattctttggggctgcgtggtggttctcacgcaagcctagtaagatattggattacgtaggaaaattcttgaatcccctctttttggtattgcttggcttacttttagtctttgcttttacgcagccaatgggtacaatccaagaggcgcctgtttctccgctttaccaagaacacgccttcttcaccggcttcacaaatgggtacaatacgttggatgcactagcctcattagcctttggcatcattattgtgactgcgatccgtaacatgggtatcacgaaaccttccgaaatcgcgaaagatacgattctttctggctctatcagtatctttctgatggggatcatctacacattgctttcctacatgggagcgatgagcctaggaaaatttgcgatcagtgccaatggtgggatcgctttagcacaagtagccaaccattacttaggccgctctggaagtctgctcttagcattgatcgtcattttagcttgtttgaaaactgcgatcggattgatcaccgcatttgccgaaacctttgcagaattgtttcctgcaagaagctacttgtttttcagtgctgttgccagcattctaccggcgatctttgcaaatatcggtctgacgaaaatcattgagttttcaactcctgttctgatgtttgtctatccgctggccattacattgattttgttggcgattattagtccattgttccagcatcgtgccagtgtgtaccgtatgaccacttatttcaccctggtggcagccgttattgacggattaaatgcttgcccggcattgattagagacactgctgtcgttcagcagttattgaaatttgcagagcaatacttgccgttcttcaaaatcggcatgggttggctggcacctgcaatcatcggtttcatcataggtctcgtttgggcttggtgcaaaaaagaaccgaaatccgtcaaaaatcattaattcaaaaaaaatgacctaccatttttgaaaggtaggccattttttttgataaaagactgacagttgaaacaaaaacaggtacaatagacccattaaaggaggatatttatgttttacgaagaacttatgatggatccgcaaacgttgatcaaatttaaattattccggcgcatgcttactttacaaaatccaaatcatccaatcgcgcaattagccaaagaaatggacttgagctatcagcaaacattcattgagttgactgagatcgatcaagatttacacgagttgaccccggatcacttgtcaatacttggacgtggtggcaagctgcagccccaaaatattgcggcaacgattgatgagtaccggttttatcttttgaacaagagcgtaccattcttatatgttctttatatgctgaatgaagaaaatcctaccattacggatttttgcaagaaatatgatgtcagccgttcaacagtatcccgaaaattcgaacatctaaaaaaccatttgaagcagtttcaattgcgttttacttatacagaatcgaatctcgttggcgacgagcgcttagtgcgtctttccttattcaatatcatttggttaggcgtccgggggatcaaatggccttttgccgtttctgagtctgatgcagaagctttcgtcgatgagtttgctagctattttcctatctctcgttcttatctagggaagctagagttaaaatattttgctgcgttggtccttttacgcattagaaaagcgaattttgcaaaatacgaccgccgttataattttttgatgaaaaacaatcgctattatgatttcaatcgcttgcgtaccacgttgactgccgatactgaattaacagaaaaacagcttaaaggagaatcaagttttatctatttgctctcccaaatgctacccttctacttgtctgaggaagatccttccttgcaacaaacattgacattctatacgactaaacagaatccgatctatccgttagtttttgatttccttgcccaaatgaaacagacctattttgctggacagcaggaacttttagatgatcctatcttgattggtaatctaatcaatgcgacctttggcaactacgtctttcgacaaccgtttcctaatatttaccggctgctcaccctttccatgggacatggtctgccacaggaacaattgcatcagcatatcgatcaattctttaccgactatcgctcttccaataatgtagactatatcaatgacaccaatcaagaacagttagcagcgatgtttactcacgtcttgttaccattctatgataagatccgctacgccaatcggctgcatgtcggtgtcgttttggaagacaactttttacttgtccaatccttgaatcaatttctgcaagatctgacctttgtgcaagcggatccttatgatccgcaattgaaggaaccctatgatttagtgattagttccaatcaattgatgaaaaaaatgaacccaacgatggcaacttatctatgggattatgcagctgctgatgctcaatacatcgatctttatcgtacgttgaaaaaatacttcaatgaaaaaaatcagcacgtgtaaccgaatcgttatcttttcttaagaacttccgaaaacttttgtcacagaatattcatatttagttagtatagtataagcataccaacaaacaaccctaacactttttcatttttaactccttcccgccggccacccaccggcgggtaattttttgtctctttttctctagaaagcaatctttaaaactttccaagcttttctccacaaaaaattcacatttgccgactatagtataagcataccaacaaacaaccctaactaacacttttcatttttaactcctagcctgtcagccacccactgacaggctcctttttttgtaaaattcctttctgtagtacaatcaatacaaaaaggggagctttatgacaaacaccattgaaacggttgatcagtatattgctggctttccggatcattccactgtattgcaggaggtccgaaatttgatcaaaacagtcctgccggatgccgaagagcggattcgttatcagatgccaacctatttccaaacagagaatatcgtccactttgcctgtgcaaaagagcacataggattttatccaacaccctctgccattcttgcttttgaaaaagaatggcagtcttataagaccagtaaaggaacaatccgtttttcgtttacagaacctattccttatgatttgattgctcgaataaccgcttggcgtttgcaagaagttttagcgaaaacaactaccgattaactaaaaaagtgtaacaaaaaagtctgtgagtgtaataaaacaacgtcctaagatcagcttgattgcttcttccgcctacatggctgctatctgctgttttggtctcttgttttacttacgtcacagactttttttacttttcgggccgcgttgctttgacctttaatgtgctgacctttaaaacgctggctaaagggatcatacgaatttgttgccgatcactttgcagtttcaaaacgacttgttctttcgcaaccgtttttccaacgatccaaccggtaacggtttcaaaactgccaaccttctcggttttcacttgtaagacgaccagatgtttgtcactggccgctttttgcaaaatttgccgaatctcattgatcttttcagtttgattttttttatcggcattgtcactgaagaaagtatccaacaaggttgtcgaagtcatgacaatcaacttgcccagctgtctgatgggagatgatttcttttccattggtctttcctttctgctaacagcagcgggtttctctaaaaccgcacatacgttctcgtttattgcttttattttaacaaattttgaggaaaaaacaagcgaacattccctttattgggcagcattttttattttttctatccaaaggggcagtcctgcttgaatcaagcggtatgtttggttgaaatctcctgtgtaataaggatctggaatatcttctccctctccaggaacgacacttaagtacgtgtaaagcttatgctgcatacctgctggagccattgctgaaaggtcctcataattgttacgatccatgccaatgatccagtcataggtttcaaaatcctcagaagtgatcttgcgggaaaccatgttctgccaagaaatccccgcatctgctaatagttgacgagttccttgatgaggcggattacccgcttcccatgaactagtggctgctgaatcgatctgccaaggcaattgacgttctgctattgcttgcttgaaaagcccttctgccatcggtgaacgacaaatatttcctaaacagacaaataaaactttcgtcatgattattgctcctctttttgataaatttgataagaaaaaaattccacatcttttgccaagcgaaagagttgggtcgcgatttctaatggcatttccggaaaatcatcacgaatccaagtttctaagattccactacagccataagaaaagaaacggctgtaaaaagcaatgtcttgttgcgacaattgttgctcttcatcgacttcatcaaacaagcgctgaaataaaggctccgtaatttgataaaactcactcatcagaatatcccggtcataagtaacagatttccgatagaaggttccgttttgccgcatcgccttcaacattttcaaagctgcttcttcccaattgtctagcgaaatgttttcagatgttagataaatcagcgcatctgttttgtagatccaacgaatcaatgcttttttatcggggaaatgataataaaaggtttgtcgattgatctgcgccttctcagccagctcttgaatgctgattttgtttaattcttttgtctcacaaagttcaacgaatgtttgaccaatgactgctttggtttgattcccttctgccatggtacacctctttttcaaattctctccttatcataccaaatttccaactaaaaaagtattcttgcagaaaaaatcccagctatttcactagctgggatcaaaaaaagagctgaaaacaatttcagctctttttttaataatgcaatccttcacgtcccaatcggttgggtgaacttatttctcaaatttttttttcaaaaattctctgcggatgcccacgactttctcggtaaagttgacccaatccactggacgcggcggcgccagccacaaaatatgattgatccccattgccccataaaaaggcatgtttgaaagagtcagatgagtcttttcatcaggaaaactttgaaactgaatattcaaatcgagaatcttttcaatattgttgcgaatcatttgattatacgaacgaccataagaaaaatcgacacatacatagagaggaacagatatttcttttaatgggatcgttgagatcaataaaatcagatagcgaaagaatagaaattccttgttgttccacaaaatgggtcggttccggttagcttcaaggtaattccgacaaaaagccacatattcagggtatgtttgcaggaaataagtgacgtccaaatgttgatactcgcatcgcgaactgaaagaaaatgaaagcagttggtaatgaatgttcgtcaattcagttgtaagcagtgctagaagctcttgggaaagagcaaaacgaccactaagttctgtatagaaatgttcatttaattgggtgatataatgattttgatcaatgtagcggtcattttctactaaccagccttctacgatcagaaaccgcaatatctcctttgcttcccgctctaaggtagtcaggctcaccgtaggcaagatcttcgccagccagtctttcagctcttcaatgattcgtaagtgttcagcattgatcaaaccatcctcaactgtattttgcagaaaatgaccattgcacattcgggtaataatgattcctaagtattgttctttgcggatctgcattcgggcagatttctgagggttcaaccagccttgactattaagcgcatcgaaagtctttctttttgtttcgatttctttcggaaaaaccgactgattcaaatagtattctttcataaaaaacaataatatgaattcccttatttcattttcttcaccgatcaatcgaaattccttcgtcacctcaatgtcataatcattaaggatctgcttgaattgtttaaattctttatacacaggcgtatggcttaaaaaatggttcgtagcgaattcataaagtgaagacagttgttcaaaaaaacattctttcagcatggaaaatttcagtgactggtccaaataataggtcaagacgttatcagaggttgccaaaccagaagcatttaatttgatcacggtcccatcagtcacaataccaaactcttcatccaatccaaattcataaaagtccgtgtttaattcttgaacggtcttgttgatcaaaaattcggacattgtcagattatccatcaatgcctcttttgtctcggataaagaaaccgcattttccaagtattgaagcagcaccaattttcgcttatccgctttattcaaaaatgtcaaaaacatgcgttttcaggcctccatcattcttttgcccataaaggacacttccggtaaataaatagcacaagcttgtaagataagacggctgatcattgccatcaccacctgaatcatcgtctggcattgctaagtcgaccgacagactatttgcaaggaagatatcttccaccgtcacgcgttttgccagctgcttgccatcagccaaaaacggttttgttagattcagtaacggctgttccttttgactgttttcttttgatttgggttcttccttaggcgatgctggttctgctgcttttggtgtcttctcatcaacaggcgcctcgttgatttctggagggtctttcggaacgatttcttctgaaggattcagcggattatagatggtagcgaatacgacctgttcggtaacaaggtcgatcattccgataataatacaggctcctaaaacaaagccaaatttgcgtttcattgattatttcaccgccttaacatagttctatctggcatctcacttgggcctctcctcacgtaccatcaataatcgatgaatctatcaaagacagccccacaccattaggtgtagctgaaaaagccagctgttcttacttgctgctaacttgttgtcctaactggagatctttctccataagacttactttgagaaacaggaaagaaaatgattccgcaatgaatcggctatcgctcatcacttttcaaaactagttactctccttcattctttttctgacgatgccaaacaatcagaaatgcaatgatcaccaagaggagtccaatcaataaatattgccacgtatgatcttcttcgatagtgacatctttccgattgaggtctcgcgcaacatcgccagccactgtaaactcttttttaaattcccatctgtataaatatctttcttcctcatcaccattcttgactttatactgtccttcatcgctttttccgctgtaggcaacagatttcagcaggtaagtacctgcttcaagcttttgtccttctaatgagatgggataagaaaaatgggaatttggtgccatctgcataccagaagtatcagaagaatagcggctgtcgttttgcccttttttagtgacatcgttgatcaaacaaaatgaattcaaataggcagcggtcggattttgaaaagtcacattgattacattgcgggcattcacttgatcaggttcgacggctaacaacttcaaatctggaacgatttcatccgttgtttgtctcaacaaaattgcgacgacataggcatattcatttttgatcgctaatccttgatcctcggactgatcagaggcttcttcctgcttttcttttaatgtcagtccaccggaaatcacgcctttaaatgattctgaaggcatgcttacttttaaaggcaaagtcacttgagactgtttgggaatcgtgatggtctctgcgatgtctaccaaatccttcaaattgtgcgttaaggtttcatcaggttcgatatcattttgaccatactcaacaacgccgtttagattggtggttgccgaagcgatcttcggctcaatcactacgtccttatccgtatcatttcttaatagaacctccaccgtttgaacagcacctggtgacatcttcaaatcaaaataagtcttagatttgtctatttggttctctggtatgactggatttactgcaaaattgaattcagaggccatgcctcttaccgaaataaaaaagaaaagacttgccaaaaccagtataatgagctgtttactttttttcatgatggattttccctctctatctatgtaccacccttacgtatcaaaaccttacacttaaagggactggttgctatggatttgtcggggtatcagttagcagccaggtaaatgtggtactgtacttcacggcatatttcgttgttgaaccaggcacttctaattcaatactatctactgctgcgaataaactgtcaccccagctcataagataagtaccggctccttcccctttttgggcactcatgactaatgattcagccccattgggatccagggtaatcgtgcttttaaaattagaaggttttggggattcggatggtgtaacgatcgtcccgttagtcaagcgaatttgagctgcttttaattcttggtctttccctgttttaaattggccattttgtttgacatgcaacgtccagccgctttccgttcctcggttatctgtgacttgtacaaaatttggtccttcttgttctgcacctgctgcatcctcatatttttgcaatgaggcatggtagacttccgtttttgaagtgattttttgcatgccaaaatacaaactggaggcaaagtcgatcgataacggtccgttggttcctggttcaggtttgccatctggcgtggtgggatcgactggtttgattggattgtctggatctgggtctattggactgattggatccgttggctccgtgtttggttcaaagacaatttgaccatttgaatgataagctgccacttctgctgcttgagcagtgatcgtgctcgtcattcccaatcctacgaatactgctgcggttactatttttttcacttttctgccccttcttattcagtctctggtacatttttgaggtaccaaatcaaggttgttcgatattctttggctaatttaaccgaacgaccaggaatgtttaattttacagctgccgctccttctgatgcatcagcaccaaagcgatagatccaagtccccatccctttgcctgccgggacattcaccaagttcatttcactattgggaacaaatgtgtgattctctactactgttggtgcatactgcttatctgtcacagaaattgctgttccggaagaaattgataatgaagcccctgctagcacttcactctgtgctgtcttaaattgaccgttctgtatgacgctaagagaccagccttcttgagtcccccgtttatctgtgacttgcacataattcggacctgctaaacttgaagtgaactcttgcagttttgcatagtaatccattgtttctgatgtgatcttttgattgccaaattggaaactggaggcaaaatcaattgacaacggcccagccgttcctggatttggtcccattggatccgtgggatcgaccgggtcgactggtttttccggatcggtagggtcgactggtttagtgagatcattatccgtttcaaaaataattgccccatttgatgtatactctgctgcaactgcggtgatcggcaagattattgaactaaggatgacgatacccatcgttattaaactctttttcatttcatttgctcctttttgataaaatacctagtgctgccaacaagcaacccccatcgcgagttaactggaagagtcagaacccgttgtgggtaagattttatgtccttgttggtcgaatggctgatttctcagtactttcgcctatggtcttggattttttgctggatattcctaaacgccataaaatgacgttccgccattgctgtcatccgcgcctatttcagcagctaaggtagttgccaaaaacaagaataatcagccgagcaaacttgcattaatgactatttttatctttactcttctgccttttatggattgcctggagcagatactagttgccaggataacgttccgctatattcgcctattttttgcttttctaccggaacaactaatttaagacctttattcgctgtttctccccattcttgattcacatgatagtcgccgttttcggtcaattccgtctcttcaacgataatttccccatttgttagtaattgctcttccccattttttacaaagaacaacgtattttctaaatgatctgtcccattactcaagctctgctgttctttcacagtgagccgccaaggacttcgttcagatcctcgtgtatctttgacaatcaaatctccttgaatgtcaggccaatacgtttgagtggtggtagtgattttttgtgccccaaaatcgatagttgtcggtacactgctcaaggtcaactcaccagcgatcgccacattcactgttttttcagcagtttgcccattttcggtgaaatgatacgtagttgtgacattttttagcagctcttcttcgcttgtttgctggatcgattcgagtgcttctggtgcaacttgcggcaactgctcgtctcgaccatcagcaaaaatcgttgcggcttccgtatatgctgctaaatcagcttgattcgtgatagccgttgcttcccctaaagtcaagcggctatctttggcaaagacagcgaattgccgattgcttgccaaggcactctcatttttcacgactaccagattgactgcttgttctacagatgattgatttgctgctcctgctttgaatgaaacaagatgcttgcgagaagttgctgaccccaatggtttttgaatctctgctattgcttcttccgtcagactatctgtaaagaatgggcgtccttgtgcctgcaaatagtccagtgcatcttctttagtgaggttctcagcttcttgttctgtaatgattgcgttctgagcacgaagttcagcttgattcgagtaagaaaccttcacttgatagctgtattcaccatcgggaatctgccaatcgactggatctgaagacgattgttctgggattgtttctgtcgcactagcaactttgcttgactggatctgtccagcataaaaccaagaacctttattctgggtttctggtgtaaaggtcagtatcggtaaatttgacccagtatacggaataagcagccgccctttttgaacctggatgccagcaatatctgttccccatgcttgaatcacaagtggcgcattattttctttaacgcctgtcacgtcatgagtgattgaaccttgcccatcagcgataccgggcatttcgacttcatagtcgatcactgaaccaggaatcgcaattccgtagccattgactcccgtcacatcattgtccccaatgaatgttttaccagtcgctttttcgatgccgctaaaagtgatcggcgtgatcggcgtcgcattgtttgcaactggattgatagtcaatacttggtagcttgtgacttctccaaaccaagtgccctgactttttgctcgtgctgcagcatcattctccgtatttttgatccaagtcaaatgatctttttttgaatctggcacttcaaaatcggaaaggttgatccgaccagtacccggaggagattcaatggttgcctcatcttcgatggttaacttactgcctgaaatcatgttgtttgctgaagaaattccaataccggcatttttcgacagctggatcgtcccaaactggtgataagtcgtactatggttggccgctgtagctgagcgcccattttttatatccccaccggtagccatcaatgtcaatccgttagtcacagttaattcggtaaaattcacgagacctaatcctgtcatagatatgggctcatcttggtaagcattggttccatctacattctcgccaaaattcattttgacttgattggtgctgttagcaacgattgcattggtgaaattgtccgttgcatttccgccagagatcccattgatacttttcgccccttgaatacgcatctctacatcgcgcaaaatctgattagaggaaatattcgagtaataggtggtatataaattaccaatactggaatcttccgcttgaatgttcatcatgatcttgccgcttctcgtattgctagcagttcggccgccatccccataaatcgtggcaccgttcaagacatccgatcctggttttgtatagatgttcagcgtaatcgtattggatgtatctgttccgacaatatttgtactgttgaatggatttccgccagaaatattggtcccgctaggcagcttaaactcaccgtcataatttcttaaatccaatgttaaacttgcatttcccaatagtctgccattattagtcacaccgccagaaaaaccattagagccagttcgtggggtaccggaaaagttcccgccgaaaatccgattattcgaatttccgttgatcgtatgagaactggaatctccgtatgaagcccctagagaggcattgatcaccccatcataaaccgttactgccacgttcccaccaatcaagagatcgttccagccgccgccagacaagaaccaatccacttgtccgttattgactgtcgtttcaccattaccatagactcttctaccggtatagccagtaccttcaagggtgtctacgatccctgagttcaatgtattcgatgcatttccttcaataactccagagaaagagccgccataggtccagcgagcaaccgtattatttagaattgttttagtattccctttgatgtagatattccaggtagttcccggatctcccccaccgccgacaatatcccagccagatagttcccctcgatttttggttgttgtggaataagcaaggttggtcggttttgatcctttataagcaataccgtctccacctggactgccatctgctgtaatcgaccccacttcaatcgtggtattcccatcaatataaccgccgcgacctgcagctgtagtatatgttgcaccatttgaaaaagaaccgctgaccagatgggaggtaatattgccgtatactttgaaacttgctcccgcttctgctaattgagcccgttgtgcgggagtataattgtcgtaagtcgttgtattcgaagctcccatcgaactttgtgagagcgtgctgacattgttcccgccgccgccattgaaatcaccgatcccaccgacactagcgctaggacccgctttgaccgtatttacgatgtttccattgattgtgccagagtatcgattaccaccttcaaaagttgcccggcctgtagaatagagactcgaatcaagattcgttacgatggcatctttagcaggttccgagccaatatttccataataggaaccgccgataaaacgattggctgtcccagtccagcctccactaccggaaacagtgctgttgattctaccgtcgatcgttccatactgaacccctccgacaaacgttcccaaccgaaaattggcatttttcgtagcaatcgtcgtttcaacattcccagtcacattggctgcatttgtagcacttgatccaacaccaccgccataatagtttgtcaatgtgccattcaattgcttgatcgctacttttgtattgccatcgatcgttccaacattggctccccctgcaatggtacttatcccagagacggtattgtttacgttgatcgttacattccccttcaacgttccgccgctttggttgcccccataaatattccaagtacctgaacccgtgttattcacatggatcgtcggattgccttccagatccccactgtttgtgccaccatatatcgtaaagccatttccaacggcacccccattgaggaaaagactgtgcccgttcatgtaaatcgtcgatcccctatagtcgatattgcgaaacacgatatccgagccaaaataattattcgttgagaaatcaacccgtcgactgcctgaagccaatgttgtcgcatctgtgatgggatcgttagcatgaccagttaatatcaagcgactaactttcccttgtaatgcataaaacgtgatattgctactgtctactgtgcttggtattgttttggctgtcagatcagccggtaaagtcaaggtaccccctgatccgacatacaaagcaaactcaccgccattgccattttgatacatatcaaacaaggcttgccgaaagccatcgacactatttgcatactcagcgtaagtttccccatcgcctgcaggacttggaacggcaacaagtcgtgaaggatctgcacttgcaataatatctttgatggacaggtctactaaggaaccgctagaccggacactcacgccctgtttaaaaactgctagcaggatctgatcatgatctaggtccacgttttgcaatgcttcattactataaatttttccttctagctgccagccttcaaaggatgccggatttttaaaggaaggaatgtccgttgctgtaagacgttccccttttttcttgctgatttgaaggcttgtttctcctgtttccaacaaacgcccttcagcacttttgaaggttatcgtcagttcttctgactcttgtgaagaactagtaacagattcttgggaatgagattcagatgctgaatgtgctggcgattcatccgattctgctgtttcagtcgcttcagatgtttcgtttgtttcgttatcctgacttgcggtaccttcactgctttcactgctactttctctgttactcgtgatactttccttattatctatatcgctaagcttttctaactcgtttaaagtatccgttgtttcacttttttgcgcgatactttctgcatgtgcaactacctctgtatatgaaaaacaaggagaagatactaatagaaaaacaagaaaattggttaaaaaacgattcactttatccctcctgactgagtgaaaatgagtaaaatattgcgcaatacacgcattatgctatccatagtctatatccaaataaaaaaaggattataatttttttttcatccattccaaaattatgattataaattgacatcctaaccgcttgtttcttctcatttttggccttgtcaggcagtttgtttgacatttacttgaaatgcttggaaaggataaatttagagttaatttcacctagcatactaaaaaaacgtaagagttcaagagatataattagaataagattataaaaatcacataataaagcaatctttaccactgaaaaattaatctattatccgaattatttgtacttgatgcccctatatagaaatcgctaacatcatttatatttcatagaattaataatgttataacgaataataattcactgtattttctaaaataaaataactcaaagtataataactgaaaaaaattttataattttttctaaacaacattagaaaaataatacaatcataaaaaataaaataactattaatctaatttaacagcatgtatttttatttccgtgcgcaaaaaaagcaccaaacagtcctctgtttggtgcttcattttcaattatttggaaaagaacgtccatcaataaatgttgtatagatatgctcgtcctctacttgctctccttgaatcgatttgacgattttctctgaagcaatcattccccaacgatgcttcgagtaagaaattgtcgacaaccgcggctgtataaacgcccctaattctgtattgtcaaaaccaatgatgcggatatcttctccgatttttaagtctgttttacgtacatacttataaaccccgatggccatttcatcgtttaaggcaaagatatcgattggtcttagcggattttttgctaaaatttcttctgctccccgataccctgagggttcagtaaaatcaccagctattacatcataggaaatgccaaatcgggtaagctctttgatactggcttctaaccgttcttgactatcataacttttttcaggaccagcaagtaaaaagacatgttggctgccacctgaaatcaatttatcaatagccagtgccgcaccacctttattatccaaaaggacttgatggatattttcatgatcgaggatccgatctagtacaacgatttgatgtccccgctgagcataccgctcaatttcctctgaaggaaaagtccaatctaaaacgatggctccatcgatcatacgctctggtataaacaaatgggattttttgccgctgcaaacaatcatttcgtaaccaaaagtctcgagactttttttaatcccgtctagcaactctccatagaaactccccgcgtagtctgcgaggtacacgccaatgatgttcgtttgtctgcgcttcagtgtacgagcagccatgttcggaacataattcaagtcacgagcaatcgcttggatacgggcgcgcgtctcctccgtcactttagggctgccgttcaaagcataggatacagtggaaatagacacaccggcttttttagcaatatctttgatccctaccatggctcctcctttctatcgataaatatcgatatgatttatttccttattgaacaacggcagcactgctgatttgtctaaacaaaaggccccttttcgatagctgttttctgctagtgtatagtctaccggttggccattgatcaatacctgttcttttgacgcttcgtgaaaatggatcttaaccggttgatcaaagacccggtaggtcatcgttaagtcagataactcagttggcaagacaggatcaaggaacaaatcatctgccatttcgcgaatgcccaagacattgctgatcaattgattcaaatagatacctggtccgctggagtacacgcgccaaccgccttttacaccgacgcttccatctctaagtttaccaaaattctcttgggcttcaagccttgttttgaaatcgccgtcagagctgctgaaatagacattggcttgtcgcagttctgcatttggcacgcgttcttgcaactgaataggattgatgacccctaaagcatgccaagtttcttctttttgtcccaatttggccattgcttcagtaaaacggatgtgggcatgaacatattgcaacccgatttcccgaccaaagttcgctgcttgctctgcacgtttgaaattcgtactgaccccaccatgataagccgctggacgattcatcaagcgaacgccatctggatgttgcaagtgttctttgatgatgcctaaatggtgctcggcttcgtccggagaaagtaattcaccgatcatgctttgctgcatcggcaacaatcggtactgaatccctgtctttttgtcttctggatggatcatcaattccacatgttcagggtcttccatataaacaaatcctgggatggttcctgaggacaaaatgtatttatcaaaatctgtacgaatgccgctgacgatggtttgtaaatgatcagcataatttggatcatagtctttcagctgttccgctagtttcttcatcacttcataagttaatgcaactgtccaactgctggccatctgctttttcaatttgctattgtttggctgcagggtatcatcccagtccccatccccataacatgaaagatacgtaccttccaagaaattcgcttcgatatatgcaatctctttctgtaaatgatcataaagagaagcagtttgacttgtctttaagaacgtttcgcgatctgtataaggtatttgcgtttctaaaatcgcgaagtccttcgttttttccaagtaatcgctgacgactttcattggccacacaatcacatctccatgactttcgtcggctttttgtttttcgtagcggtcaaacataaaccattgcggccaattgccatcgtcggcaaattgattggcaaagaggtgtttgatgatcgacgcaacgatctctggacgattgactgctaagaaaaattctgttggtccttgtgagacatctctggtcccccaagcagcaccgccatactgttccaaaccatgaggagacaaataatggaccagcatgttgtgcgtgtaccaccgagagagcaaattaagagtttggacttctgcttggtcatgggtcaattcaaattgattcagcagtgaatcaatgaacgtcacatattttgcttcttcttgctgcttagaagacgcttgttctcggtaaggatctccggtcaacgttccctgaatcttaagggtaacttctgactgatccgcaaatgtcagaacagttagtgcgccatcactgttttcttgtaagaacaaggaatcatctgtcacatcaaaaggctgatccgcctgcagataataagttaattctggatacgcttcttttactggtgacgtagtcccgcttgtgatcactacttgctgctcttttttcacaaccgctgtcggtgcttcttcatctggccccatcaaaaactggttgctgatggcccatgaataagcctttttgctatggatcatcgttcggatctcacggctgtcaagcagtgtatacgtcgtgaccgtgatcaaatcatctgctgttttgtaataccacgttgcagagttcagccccatctcgaacgcagatggcatcgtcaataagcgccacgtatcctgttctttcaagtagatccgctgtcctgatcgtttcatgacattcaacgcattacggctgttactcaataatttattcattgacgtattccctagaacgatctgcgaattgaaaataccatacatataaaccgtcgtactaagcaacggctgatctaccactagatcactgccactcagcaatatatgcccatgagcccgttccatggcactttctttttccttcaacacaacgtgacggtagttttcggtaaaaaatgaatacatttggccatcgattcgttccattgcttcctgttttggaaatagcgcggaaatatctgcttctgacaaggtatctccagtcaatgctgctccgagttgttttgccggaagtagctgtgtcgtcaatgactcaaaagtcaatttttgaaactgttccttcagagaagggcggtcgaattgcggaccggatactgcttgtggctgatctgccttgacagcactataaaaaatgacttctgttgtttcgtcagatagctgataagactcggactgcaaagcaatgtaggcaaattcatattgatacaattcattcgctaatgtttcgtgcgctaaggcttgcggcaaattagtcaccttgtatgttctgccaaaaaattgatacccatctgttgaataactccgcaagggttggaaacttccttgttcgactaatggaaatttgccggattgcggttgattttgacgagaagagacgacgatcgttccgttatcctgagtcacgtggtgatccagatattgagaaacatacgcttcattggactgaactgctccttttagtgcattgcctatatcttgaccataaatgatatctgcttttccagaacccgttaactggattcgccaaaaccagcaatcttctgccagttgcaagtccacttgataatgaacgtccaaaaactctcctgaccaagacaactgctgttgggaatacccaaacttactggctgaattagaaccgaccatcggtgtccaacgaatcccttctgatgtatagactcgcagatacaattgattcaaactgccgtctaacggattgccatttagttgattgatcatcatgccattgctatctatttcatacagatccccggttttcaaaaacctcaggcgtgtctgattcttttcaagagtaatatattgtgtcatataaaccttcctatccttatcttacgaatttgaatgtagccatctgcagatcgcgactgttgctgccgaccatggcttggaatgtgccagcatcactggatgtttcctgattgctgtggacgtaacgcaacatatcttccgtaattgaaaaagttacttctttggtttcccctggttctaaccatactttttggaatccttttaattctttgattggtcggacaacttcaccaacgaggtctcgcagatataactggacggtttcttcaccagcaaagtcgctattattcttgatctgaagggatactgtcagtgtctcttcagcagacagttgtgatttatctaaacttaactcactatactgagcctcgtgatagctcaaaccgaaaccaaaaggatattttgcatagttggagacatccaaatatttcgagacatatttttcatcaggtgcactttcataaggacgaccggtagtttcagtattgtaataaacaggtacttgaccgactgtttctgggaaagacatactcaaacggccgcttggattgtattgtccccataaaagatttgctaatgcgtgaccaccttctgttccagggaaccatgcttcaacgatggcttttgcttcatcaatgccttgaagatctaatggacgaccattatacaaggtcacaacgagttgctcattgactgcctgcaattgtttgaataatgctaactgcgcttcaggcaagcgaatatcgctgcggctcgctgcttctccgctcatccagtcttgttcacctagtgcgagaaccactttatctgcttgtttagctaatgtaacagcttcattgatcgctgcttctgttggcgcaaaataatcgaatggttcttttccataaagaatgttctctgaaactgctttgctcccttcgatcaatgaaacggcttcttcttgtttcccttgccatgaccatgcacctaaaatatctttagagtgagccgctggtccaatgatcgcgaccgtctccgttgatttaaatggtaagatgttctcattcttcaataaaaccattgatttttgagcgatttctctcgcggctgttcgatgttcttgcgaaagtacgaccctagcttcagcagcttcatctgccccacgatgaggattttcaaaaagaccaagatcatttttaagggtcaagatccgcaatactgcttcatccaataactcttccgcaacagcgccttcttcgatcaattctttcaaataatcgttgtagcaagtcgtcatcatttcaatatcgacgcctgctttgatcgctaattctgccgcctgtttctcatcctctgctgcgccatgggcaatgatttctttgaccgcaccccagtcagagatcactacgccatcaaaaccaaattcttttcgcaacacatcacggaacaaccagcgattcgctgtagccggaatcccatctaccgtattaaaggaagtcatcaccaattttgccccagctgctagtgcggcttggtagcctggtaagtaactttcccgcaattgacgctcagacatattgactgtgttgtaatcacgaccgccaattgctgcgccatacgccgcaaaatgcttcacacaagcggcgacccgttcaaaatcattggtcaagtcttctccttggtagcctttcacgaaagcctccgcaaggcgactgttcaagtagggatcttctccggtagattccatcactcgtccccaacgagggtctcggactaagtccaccattggcgagaacgtcacatggagcccagacacagcggcttctctagctgaaatttcggccatttgttccgcagcattcagatcccacgaactacctagagccaatggaatcgggaagattgttcgaaacccatggataatatctgccattagaatcgtcgggatctgcaggcgattgtttttgatgtattcttgttgtactcggatcgcttctttggcaccggaaacgcctagcgttgttccagcgttgttgatggtttcttgggtcagtcccagatcactcatcggtccggttttttcttccgctttgtctgaataaaacgcagcagccagttgcaataattgatcgattttttcatcgatagtcatttgttcaagtaagtgcgtcaattttgtcttttccatttttgttccacctttatcgttcatcgaatcggagatctgcttccaacgggaaatgatcggaaggaaaccgtccgtcacaagaatccgtcaaacacccggttttaatgattcgaaatcctttagtataaatataatcaatttcttctaactggttccatgggagttgatagtcaaaattttgataggaacctctgggaccgtaatgtcctttttcattttgttcttttgcgttaacaaaaatcgtttgcagggattcatggacgcgttcaactgcttctgcattgagatcccccattagtaaaacgggtaaagcggcgattttatccgctaaccgttccaagatgactttcatcccttcaaaacgggcgatttctgaaatattgtccagatgcgtgtcgatgactaaaaagtcatgtccttttctatctcttagtaccgtccacaaacacagacgcaagtattccgcttctggatgaatacttggcacatcaggtgtcagagataaccaaaatgagcctgaatctactttagaaaacatcgtcttcttgtaatagatcccgataccttctcctgttccatcgccgtctcgttcagcagttaccgactcgtaatcagtcaatcttgctaaatcagcgacttgcgtcggccggacttcttgtacgcacaaaatatcccaatcatgataatcgatcaatgccaatac

(The sequence listing continues in the following parts.)

1.-24. (canceled)

25. A method of increasing microbiome diversity in a gastrointestinal tract of a subject suffering from a reduced microbiome diversity relative to a healthy subject, as measured in feces, comprising administering to the subject a pharmaceutical composition containing an effective amount of an Enterococcus gallinarum or Enterococcus caselliflavus bacteria strain, wherein the administering results in an increase in an amount of Barnesiella bacteria in the gastrointestinal tract of the subject, relative to an amount of the Barnesiella bacteria prior to the administering.

26. The method of claim 25, wherein the Barnesiella bacteria is of species Barnesiella intestinihominis.

27. The method of claim 25, wherein the bacteria strain is of species Enterococcus gallinarum.

28. The method of claim 27, wherein the Enterococcus gallinarum bacteria strain comprises a 16s rRNA gene sequence with 95% sequence identity to SEQ ID NO:1, SEQ ID NO:2, or SEQ ID NO:5, as determined by a Smith-Waterman homology search algorithm using an affine gap search with a gap open penalty of 12, a gap extension penalty of 2, and a Blocks Substitution Matrix (BLOSUM) of 62.

29. The method of claim 27, wherein the Enterococcus gallinarum bacteria strain comprises a 16s rRNA gene sequence of SEQ ID NO:1, SEQ ID NO:2, or SEQ ID NO:5.

30. The method of claim 25, wherein the bacteria strain is of species Enterococcus caselliflavus.

31. The method of claim 25, wherein the administering results in an increase in Lachnospiraceae bacteria, relative to an amount prior to the administering.

32. The method of claim 25, wherein the administering results in an increase in Roseburia bacteria, relative to an amount prior to the administering.

33. The method of claim 25, wherein the bacteria strain is dried.

34. The method of claim 25, wherein the administering is oral.

35. The method of claim 25, wherein the pharmaceutical composition comprises from about 1×10³ to about 1×10¹¹ colony forming units (CFU)/g of the bacteria strain, with respect to a total weight of the pharmaceutical composition.

36. A method of increasing microbiome diversity in a gastrointestinal tract of a subject suffering from a reduced microbiome diversity relative to a healthy subject, as measured in feces, comprising administering to the subject a pharmaceutical composition containing an effective amount of an Enterococcus gallinarum or Enterococcus caselliflavus bacteria strain wherein the administering is sufficient to increase microbiome diversity in a gastrointestinal tract of a subject, as determined by an increase in a Shannon Diversity Index of at least 0.1 from a fecal sample obtained from the subject about 18 days after the administering, relative to a fecal sample obtained from the subject prior to the administering.

37. The method of claim 36, wherein the bacteria strain is of species Enterococcus gallinarum.

38. The method of claim 37, wherein the Enterococcus gallinarum bacteria strain comprises a 16s rRNA gene sequence with 95% sequence identity to SEQ ID NO:1, SEQ ID NO:2, or SEQ ID NO:5, as determined by a Smith-Waterman homology search algorithm using an affine gap search with a gap open penalty of 12, a gap extension penalty of 2, and a Blocks Substitution Matrix (BLOSUM) of 62.

39. The method of claim 37, wherein the Enterococcus gallinarum bacteria strain comprises a 16s rRNA gene sequence of SEQ ID NO:1, SEQ ID NO:2, or SEQ ID NO:5.

40. The method of claim 36, wherein the bacteria strain is of species Enterococcus caselliflavus.

41. The method of claim 36, wherein the bacteria strain is dried.

42. The method of claim 36, wherein the administering is oral.

43. The method of claim 36, wherein the administering is sufficient to increase the Shannon Diversity Index by about 0.2, relative to prior to the administering.

44. The method of claim 36, wherein the bacteria strain is encapsulated in a capsule.

45. The method of claim 36, wherein the pharmaceutical composition is an enteric formulation.

46. The method of claim 36, wherein the pharmaceutical composition comprises from about 1×10³ to about 1×10¹¹ colony forming units (CFU)/g of the bacteria strain, with respect to a total weight of the pharmaceutical composition.
